(19) United States
(12) Patent Application Publication
(10) Pub. No.: US 2025/0163513 A1
(43) Pub. Date: May 22, 2025

(54) METHODS OF TREATMENT FOR HPV MALIGNANCIES

(71) Applicant: The University of North Carolina at Chapel Hill, Chapel Hill, NC (US)

(72) Inventor: Travis Schrank, Chapel Hill, NC (US)

(21) Appl. No.: 18/839,605

(22) PCT Filed: Feb. 22, 2023
(86) PCT No.: PCT/US2023/063005

§ 371 Date: Aug. 19, 2024

Related U.S. Application Data
(60) Provisional application No. 63/313,056, filed on Feb. 23, 2022.

(51) Int. Cl. C12Q 1/6886; C12Q 1/70

(52) U.S. Cl. CPC C12Q 1/6886; C12Q 1/708; C12Q 2600/106; C12Q 2600/156; C12Q 2600/158

(57) ABSTRACT

This invention relates to human papilloma virus (HPV) positive cancers such as HPV⁺ squamous cell carcinoma of the oropharynx (OPSCC). This invention further relates methods of determining treatment regimens, methods of stratifying prognosis from treatment of HPV positive cancers, methods of determining suitability for de-escalation of treatment of HPV positive cancers, and methods of treating HPV positive cancers.

### STATEMENT OF PRIORITY

[0001] This application claims the benefit, under 35 U.S.C. § 119 (e), of U.S. Provisional Application No. 63/313,056, filed on Feb. 23, 2022, the entire contents of which are incorporated by reference herein.

### STATEMENT OF GOVERNMENT SUPPORT

[0002] This invention was made with government support under Grant Number DE029241 awarded by the National Institutes of Health. The government has certain rights in the invention.

### STATEMENT REGARDING ELECTRONIC FILING OF A SEQUENCE LISTING

[0003] A Sequence Listing in XML format, entitled 5470-905WO_ST26.xml, 1,103,014 bytes in size, generated on Feb. 22, 2023 and filed herewith, is hereby incorporated by reference in its entirety for its disclosures.

### FIELD OF THE INVENTION

[0004] This invention relates to human papilloma virus (HPV) positive cancers such as HPV⁺ squamous cell carcinoma of the oropharynx (OPSCC). This invention further relates methods of determining treatment regimens, methods of stratifying prognosis from treatment of HPV positive cancers, methods of determining suitability for de-escalation of treatment of HPV positive cancers, and methods of treating HPV positive cancers.

### BACKGROUND OF THE INVENTION

[0005] HPV-positive (HPV+) squamous cell carcinoma of the oropharynx (OPSCC) is the most prevalent HPV-associated malignancy in the United States and is primarily caused by HPV16. HPV+ OPSCC has surpassed cervical cancer in incidence and is the most commonly diagnosed malignancy caused by HPV in the USA (Pan et al. Cancers Head Neck. 2018; 3). HPV+ OPSCC has an improved prognosis compared to non-HPV OPSCC, however, treatment can carry significant, lifelong therapeutic toxicity. While the concept of de-escalation of therapy represents an effort to limit morbidity while preserving tumor control, there are few available tools to select appropriate patients with favorable prognosis.

[0006] The present invention overcomes previous shortcomings in the art by providing methods of stratifying risk prognosis, determining treatment regimens, and determining suitability for de-escalated therapy for HPV-associated malignancies such as OPSCC.

### SUMMARY OF THE INVENTION

[0007] One aspect of the present invention provides a method of determining a treatment regimen for a subject having human papillomavirus (HPV) positive (HPV+) cancer (e.g., OPSCC) or a subject at risk for or suspected to have or develop HPV+ cancer (e.g., OPSCC), comprising: a) obtaining a sample from the subject; b) detecting a level of expression of HPV virus genome and/or genome product in the sample; c) obtaining sequence information of the HPV viral genome and/or genome product in the sample; d) comparing the sequence information obtained in c) to a reference HPV viral genome; and e) determining the prognosis of the subject upon treatment to the cancer, wherein a low divergence of the sequence information of the detected HPV virus genome and/or genome product as compared to the reference HPV viral genome identifies the subject as a candidate for standard (e.g., “therapeutic”) treatment for OPSCC, and wherein a greater divergence identifies the subject as a suitable candidate for de-escalated (e.g., “sub-therapeutic”) treatment for the cancer.

[0008] Another aspect of the present invention provides a method of stratifying prognosis from treatment of human papillomavirus (HPV) positive cancer in a subject having human papillomavirus (HPV) positive (HPV+) cancer or a subject at risk for or suspected to have or develop HPV+ cancer, comprising: a) obtaining a sample from the subject; b) detecting a level of expression of HPV virus genome and/or genome product in the sample; c) obtaining sequence information of the HPV viral genome and/or genome product in the sample; d) comparing the sequence information obtained in c) to a reference HPV viral genome; and e) stratifying the prognosis of the subject upon treatment to the cancer, wherein a low divergence of the sequence information of the detected HPV virus genome and/or genome product as compared to the reference HPV viral genome categorizes the subject as having elevated risk of poor prognosis from de-escalated (e.g., “sub-therapeutic”) treatment to the cancer, and wherein a greater divergence categorizes the subject as having reduced risk of poor prognosis from de-escalated treatment to the cancer.

[0009] Another aspect of the present invention provides a method of determining suitability for de-escalation of treatment of human papillomavirus (HPV) positive cancer in a subject having human papillomavirus (HPV) positive (HPV+) cancer or a subject at risk for or suspected to have or develop HPV+ cancer, comprising: a) obtaining a sample from the subject; b) detecting a level of expression of HPV virus genome and/or genome product in the sample; c) obtaining sequence information of the HPV viral genome and/or genome product in the sample; d) comparing the sequence information obtained in c) to a reference HPV viral genome; and e) determining the prognosis of the subject upon treatment to the cancer, wherein a greater divergence identifies the subject as a suitable candidate for de-escalated (e.g., “sub-therapeutic”) treatment for the cancer.

[0010] Another aspect of the present invention provides a method of de-escalating treatment of human papillomavirus (HPV) positive cancer in a subject having human papillomavirus (HPV) positive (HPV+) cancer or a subject at risk for or suspected to have or develop HPV+ cancer and undergoing standard (e.g., “therapeutic,” “escalated”) treatment of the cancer, comprising: a) obtaining a sample from the subject; b) detecting a level of expression of HPV virus genome and/or genome product in the sample; c) obtaining sequence information of the HPV viral genome and/or genome product in the sample; d) comparing the sequence information obtained in c) to a reference HPV viral genome; e) identifying the risk of poor prognosis of the subject from de-escalated treatment to the cancer, wherein a low divergence of the sequence information of the detected HPV virus genome and/or genome product as compared to the reference HPV viral genome categorizes the subject as having elevated risk of poor prognosis from de-escalated (e.g., “sub-therapeutic”) treatment to the cancer, and wherein a greater divergence categorizes the subject as having reduced risk of poor prognosis from de-escalated treatment to the cancer; and f) treating the subject identified as having reduced risk of poor prognosis with de-escalated treatment as compared to standard treatment for the cancer.

[0011] Another aspect of the present invention provides a method of treating human papillomavirus (HPV) positive (HPV+) cancer in a subject having human papillomavirus (HPV) positive (HPV+) cancer or a subject at risk for or suspected to have or develop HPV+ cancer, comprising: a) obtaining a sample from the subject; b) detecting a level of expression of HPV virus genome and/or genome product in the sample; c) obtaining sequence information of the HPV viral genome and/or genome product in the sample; d) comparing the sequence information obtained in c) to a reference HPV viral genome; e) identifying the risk of poor prognosis of the subject from de-escalated treatment to the cancer, wherein a low divergence of the sequence information of the detected HPV virus genome and/or genome product as compared to the reference HPV viral genome categorizes the subject as having elevated risk of poor prognosis from de-escalated (e.g., “sub-therapeutic”) treatment to the cancer, and wherein a greater divergence categorizes the subject as having reduced risk of poor prognosis from de-escalated treatment to the cancer; and f) treating the subject identified as having reduced risk of poor prognosis with de-escalated treatment as compared to standard (e.g., “therapeutic”) treatment for the cancer.

[0012] In some embodiments, the sequence information of the HPV viral genome and/or genome product in the sample comprises RNA and/or DNA sequence information.

### BRIEF DESCRIPTION OF THE DRAWINGS

[0013] FIG. 1 shows a schematic of HPV16 positivity assignment and cohort composition. FIG. 1 panel A. Histogram of sequencing reads mapping to HPV16, normalized to human reads. Dashed line-Threshold for HPV16 positivity applied. FIG. 1 panel B. Normalized reads mapping to HPV16 versus a library of 336 other HPV genomes included in the ViFi package. C. Flow diagram illustrating cohort construction for genotypic and clinical analyses.

[0014] FIG. 2 shows bar graphs quantifying sequence conservation by viral gene and characteristics of sub-clonal polymorphisms. FIG. 2 panel A. Conservation of Viral Genes. All clonal polymorphisms relative to the HPV16A1 reference were examined. The ratio of missense to synonymous SNPs were compared between the gene in question and all other viral genes. Significance based on Wilcoxon Rank-sum test. FIG. 2 panel B. Conservation of Viral Genes based on Uncommon Polymorphisms. Clonal polymorphisms were examined if present in less than 25% of cases examined. The ratio of missense to synonymous uncommon SNPs were compared between the gene in question and all other viral genes. Significance based on Wilcoxon Rank-sum test. FIG. 2 panel C. Distribution of non-synonymous polymorphisms amongst HPV16 viral genes. Significance based on chi-squared test. FIG. 2 panel D. Proportion of SNPs by predicted effect. Significance based on chi-squared test. FIG. 2 panel E. Proportion of potentially APOBEC related SNPs in the HPV16 viral genome, compared between clonal and sub-clonal SNPs. Significance based on chi-squared test. *** P-value<1*10\hat{ }-3.

[0015] FIG. 3 shows data plots analyzing HPV16 Genotypes by Sub-lineage. FIG. 3 panel A. Heatmap of common non-synonymous polymorphisms in the HPV16 genome. Columns-patient tumor samples. Sub-lineage—the nearest HPV16 sub-lineage reference sequence by the JC69 sequence distance. Number of Non-synon. Poly.—Number of non-synonymous polymorphisms relative to the HPV16 A1 reference. Relative Viral Copy Number-Viral copy-number relative to human genomic material. Defined as Log 2 (HPV16 Reads/Human Reads). Common Polymorphism—The 15 most common non-synonymous polymorphisms relative to HPV16 A1 are listed in order of decreasing prevalence. FIG. 3 panel B. Kaplan-Meier Plot of Recurrence-free Survival, comparing sub-lineage A1 to others. P-value represents log-rank test. HR-estimated hazard ratio with 95% confidence interval. FIG. 3 panel C. Proportion of Cases Stratified by AJCC8 Clinical Staging. Significance based on chi-squared test. FIG. 3 panel D. Tobacco Smoke Exposure. Significance based on Wilcoxen Rank-sum test. FIG. 3 panel E. Predicted Viral Proteomic Neo-Antigenicity. Neo-Antigenicity was estimated by the number of viral peptides with <350 nM affinity for MHC, based on the patients HLA subtype. Significance based on Wilcoxen Rank-sum test. FIG. 3 panel F. Human Genomic Copy-number Variant Burden. Number of copy number events as identified by the SynthEx pipeline. Significance based on Wilcoxon Rank-sum test. * P-value <5*10\hat{ }-2. NS-not significant. A1—HPV16 genome assigned to HPV16-A1 sub-lineage based on nearest JC69 distance. Other-HPV16 genome assigned to sub-lineage other than HPV16-A1 based on nearest JC69 distance. FIG. 3 panel G. HPV16 Sub-lineages for sequenced HPV16+ tumors from the oropharynx and uterine cervix. FIG. 3 panel H. Common HPV16 Non-synonymous polymorphisms in sequenced HPV16+ tumors from the oropharynx and uterine cervix. FIG. 3 panel I. Proportion of Tumors with HPV16 Deep Copy Loss in E2 or a large loss (involving >10% of the viral genome). Chi-squared test. P-value<5*10\hat{ }-2.

[0016] FIG. 4 shows a schematic of viral phylogeny and related bar graphs quantifying tumor Genomic and Patient Factors Stratified by Maximum Parsimony Phylogeny of OPSCC HPV16 Viral Genomes. FIG. 4 panel A. Maximum Parsimony Phylogeny of HPV16 genomes. Color—Above or below the median number of non-synonymous clonal polymorphisms in the HPV16 genome relative to the A1 reference sequence. Tip point size/color—Total number of non-synonymous clonal polymorphisms in the HPV16 genome relative to the A1 reference sequence. FIG. 4 panel B. Kaplan-Meier Plot of Recurrence-free Survival, comparing viral clades indicated in Panel A. P-value represents log-rank test. HR-estimated hazard ratio with 95% confidence interval. FIG. 4 panel C. Proportion of Cases Stratified by AJCC8 Clinical Staging in near and far clades. Significance based on chi-squared test. FIG. 4 panel D. Tobacco Smoke Exposure for near and far clades. Significance based on Wilcoxon Rank-sum test. FIG. 4 panel E. Predicted Viral Proteomic Neo-Antigenicity for near and far clades. Neo-Antigenicity was estimated by the number viral peptides with <350 nM affinity for MHC, based on the patients HLA subtype. Significance based on Wilcoxon Rank-sum test. FIG. 4 panel F. Human Genomic Copy-number Variant Burden. Number of copy number events as identified by the SynthEx pipeline. Significance based on Wilcoxon Rank-sum test. * P-value<5*10\hat{ }-2.

[0017] FIG. 5 shows data plots regarding the origins of Environmental and Intra-tumoral Genomic Diversity of Oncogenic HPV16 in HNSCC. FIG. 5 panels A and B. Mutational Signature Analysis of Uncommon HPV16 Non-synonymous Clonal (Environmental) Polymorphisms. All non-synonymous polymorphisms identified in less than 25% of tumors were included. Non-negative matrix decomposition of all included SNPs was performed based on the COSMIC signatures V2, as implemented by the DeconstructSigs R package. FIG. 5 panel A. Tumors in the viral clade near the HPV16-A1 reference sequence. FIG. 5 panel B. Viral genomes distal to relative to HPV16-A1. FIG. 5 panels C-E. Estimating HPV16 Sub-clonality with Binomial Mixture Clustering Analysis. FIG. 5 panel C. Scatter plot of Sub-clone Defining Viral SNPs. VAF—variant allele frequency. FIG. 5 panel D. Bar Plot of frequency of tumors by number of HPV16 sub-clonal populations. Populations defined by VAF Groups defined by binomial mixture clustering with BIC analysis as implemented in the R Canopy package.

[0018] FIG. 6 shows a schematic of viral phylogeny and data plots HPV16 Viral Genotyping and Integration Analysis by RNA Sequencing. FIG. 6 panel A. Maximum Parsimony Phylogeny of HPV16 genomes from the DNA sequencing cohort. Links-Connect known (DNAseq) genotype, with nearest neighbor genotype assigned from RNAseq, for 13 patients with available DNA and RNA sequencing data. Color—Viral clade as assigned in FIG. 4. Tip point size—Number of RNAseq cases assigned at a neighbor to the indicated DNAseq case. FIG. 6 panels B-G. Kaplan-Meier Plot of Recurrence-free Survival, comparing viral clades vs. viral integration status, stratified by tobacco smoke exposure. P-value represents log-rank test. HR—estimated hazard ratio with 95% confidence interval. FIG. 6 panel H. Annotated heat map of HPV16 viral gene expression. Columns—tumor samples, organized by E6E7/E5E2 ratio. Viral Clade—as assigned in panel A. Integrated—Assigned integration status based in E6E7/E5E2 ratio. Split Reads—Presence of detectable split read—pairs mapping to both the HPV16 and human genome. FIG. 6 panels I-K. Genomic and clinical features of the <=10 pack-year smoking exposure sub-group. FIG. 6 panel I. HPV16 Integration status-based in E6E7/E5E2 ratio Significance based on Chi-squared test. FIG. 6 panel J. AJCC8 summary stage. Significance based on Chi-squared test. FIG. 6 panel K. Tobacco Smoke Exposure. Significance based on Wilcoxon Rank-sum test. * P-value<5*10\hat{ }-2. NS—not significant. Near-HPV16 viral clade nearest to the HPV16-A1 sub-lineage based on JC69 distance. Far—HPV16 viral clade distal to the HPV16-A1 sub-lineage based on JC69 distance.

[0019] FIG. 7 shows Kaplan-Meier Plots of Recurrence-free Survival, comparing viral clades as assigned in FIG. 4, stratified by tobacco smoke exposure. FIG. 7 panel A. Patients from initial DNA sequencing cohort with no more than 30 pack-years of tobacco smoke exposure. FIG. 7 panel B. Patients initial DNA sequencing cohort with no more than 10 pack-years of tobacco smoke exposure.

[0020] FIG. 8 shows a Waterfall Plot of somatic variants identified. Genes area displayed in order of decreasing frequency of somatic alteration. Near HPV16-A1 Clade. Variants from 18 patients from initial DNA sequencing cohort assigned to the near A1 clade. Divergent from HPV16-A1 Clade. Variants from 19 patients from initial DNA sequencing cohort assigned to the clade divergent from A1, as in FIG. 4. Color-predicted variant effect of SNPs and small INDELs. Structural variants were not analyzed. No statistical differences could be detected between the two groups.

[0021] FIG. 9 shows average sequencing coverage depth by genomic locus of the HPV16 genome.

### DETAILED DESCRIPTION

[0022] The present invention now will be described hereinafter with reference to the accompanying drawings and examples, in which embodiments of the invention are shown. This description is not intended to be a detailed catalog of all the different ways in which the invention may be implemented, or all the features that may be added to the instant invention. For example, features illustrated with respect to one embodiment may be incorporated into other embodiments, and features illustrated with respect to a particular embodiment may be deleted from that embodiment. Thus, the invention contemplates that in some embodiments of the invention, any feature or combination of features set forth herein can be excluded or omitted. In addition, numerous variations and additions to the various embodiments suggested herein will be apparent to those skilled in the art in light of the instant disclosure, which do not depart from the instant invention. Hence, the following descriptions are intended to illustrate some particular embodiments of the invention, and not to exhaustively specify all permutations, combinations, and variations thereof.

[0023] Unless otherwise defined, all technical and scientific terms used herein have the same meaning as commonly understood by one of ordinary skill in the art to which this invention belongs. The terminology used in the description of the invention herein is for the purpose of describing particular embodiments only and is not intended to be limiting of the invention.

[0024] All publications, patent applications, patents and other references cited herein are incorporated by reference in their entireties for the teachings relevant to the sentence and/or paragraph in which the reference is presented.

[0025] Unless the context indicates otherwise, it is specifically intended that the various features of the invention described herein can be used in any combination. Moreover, the present invention also contemplates that in some embodiments of the invention, any feature or combination of features set forth herein can be excluded or omitted. To illustrate, if the specification states that a composition comprises components A, B and C, it is specifically intended that any of A, B or C, or a combination thereof, can be omitted and disclaimed singularly or in any combination.

[0026] As used in the description of the invention and the appended claims, the singular forms “a,” “an” and “the” are intended to include the plural forms as well, unless the context clearly indicates otherwise.

[0027] Also as used herein, “and/or” refers to and encompasses any and all possible combinations of one or more of the associated listed items, as well as the lack of combinations when interpreted in the alternative (“or”).

[0028] The term “about,” as used herein when referring to a measurable value such as an amount or concentration and the like, is meant to encompass variations of ±10%, ±5%, ±1%, ±0.5%, or even ±0.1% of the specified value as well as the specified value. For example, “about X” where X is the measurable value, is meant to include X as well as variations of ±10%, ±5%, ±1%, ±0.5%, or even ±0.1% of X. A range provided herein for a measurable value may include any other range and/or individual value therein.

[0029] As used herein, phrases such as “between X and Y” and “between about X and Y” should be interpreted to include X and Y. As used herein, phrases such as “between about X and Y” mean “between about X and about Y” and phrases such as “from about X to Y” mean “from about X to about Y.”

[0030] The term “comprise,” “comprises” and “comprising” as used herein, specify the presence of the stated features, integers, steps, operations, elements, and/or components, but do not preclude the presence or addition of one or more other features, integers, steps, operations, elements, components, and/or groups thereof.

[0031] As used herein, the transitional phrase “consisting essentially of” means that the scope of a claim is to be interpreted to encompass the specified materials or steps recited in the claim and those that do not materially affect the basic and novel characteristic(s) of the claimed invention. Thus, the term “consisting essentially of” when used in a claim of this invention is not intended to be interpreted to be equivalent to “comprising.” With respect to the terms “comprising”, “consisting essentially of”, and “consisting of”, where one of these three terms is used herein, the presently disclosed subject matter can include the use of either of the other two terms.

[0032] The term “consists essentially of” (and grammatical variants), as applied to a polynucleotide or polypeptide sequence of this invention, means a polynucleotide or polypeptide that consists of both the recited sequence (e.g., SEQ ID NO) and a total of ten or fewer (e.g., 1, 2, 3, 4, 5, 6, 7, 8, 9, or 10) additional nucleotides or amino acids on the 5′ and/or 3′ or N-terminal and/or C-terminal ends of the recited sequence or between the two ends (e.g., between domains) such that the function of the polynucleotide or polypeptide is not materially altered. The total of ten or fewer additional nucleotides or amino acids includes the total number of additional nucleotides or amino acids added together. The term “materially altered,” as applied to polynucleotides of the invention, refers to an increase or decrease in ability to express the encoded polypeptide of at least about 50% or more as compared to the expression level of a polynucleotide consisting of the recited sequence. The term “materially altered,” as applied to polypeptides of the invention, refers to an increase or decrease in biological activity of at least about 50% or more as compared to the activity of a polypeptide consisting of the recited sequence.

[0033] The term “sequence identity,” as used herein, has its standard meaning in the art. As is known in the art, a number of different programs can be used to identify whether a polynucleotide or polypeptide has sequence identity or similarity to a known sequence. Sequence identity or similarity may be determined using standard techniques known in the art, including, but not limited to, the local sequence identity algorithm of Smith & Waterman, Adv. Appl. Math. 2:482 (1981), by the sequence identity alignment algorithm of Needleman & Wunsch, J. Mol. Biol. 48:443 (1970), by the search for similarity method of Pearson & Lipman, Proc. Natl. Acad. Sci. USA 85:2444 (1988), by computerized implementations of these algorithms (GAP, BESTFIT, FASTA, and TFASTA in the Wisconsin Genetics Software Package, Genetics Computer Group, 575 Science Drive, Madison, WI), the Best Fit sequence program described by Devereux et al., Nucl. Acid Res. 12:387 (1984), preferably using the default settings, or by inspection.

[0034] An example of a useful algorithm is PILEUP. PILEUP creates a multiple sequence alignment from a group of related sequences using progressive, pairwise alignments. It can also plot a tree showing the clustering relationships used to create the alignment. PILEUP uses a simplification of the progressive alignment method of Feng & Doolittle, J. Mol. Evol. 35:351 (1987); the method is similar to that described by Higgins & Sharp, CABIOS 5:151 (1989).

[0035] Another example of a useful algorithm is the BLAST algorithm, described in Altschul et al., J. Mol. Biol. 215:403 (1990) and Karlin et al., Proc. Natl. Acad. Sci. USA 90:5873 (1993). A particularly useful BLAST program is the WU-BLAST-2 program which was obtained from Altschul et al., Meth. Enzymol., 266:460 (1996); blast.wustl/edu/blast/README.html. WU-BLAST-2 uses several search parameters, which are preferably set to their default values. The parameters are dynamic values and are established by the program itself depending upon the composition of the particular sequence of interest and the composition of the particular database against which the sequence of interest is being searched; however, the values may be adjusted to increase sensitivity.

[0036] An additional useful algorithm is gapped BLAST as reported by Altschul et al., Nucleic Acids Res. 25:3389 (1997).

[0037] A percentage amino acid sequence identity value is determined by the number of matching identical residues divided by the total number of residues of the “longer” sequence in the aligned region. The “longer” sequence is the one having the most actual residues in the aligned region (gaps introduced by WU-BLAST-2 to maximize the alignment score are ignored).

[0038] In a similar manner, percent nucleic acid sequence identity is defined as the percentage of nucleotide residues in the candidate sequence that are identical with the nucleotides in the polynucleotide specifically disclosed herein.

[0039] The alignment may include the introduction of gaps in the sequences to be aligned. In addition, for sequences that contain either more or fewer nucleotides than the polynucleotides specifically disclosed herein, it is understood that in one embodiment, the percentage of sequence identity will be determined based on the number of identical nucleotides in relation to the total number of nucleotides. Thus, for example, sequence identity of sequences shorter than a sequence specifically disclosed herein, will be determined using the number of nucleotides in the shorter sequence, in one embodiment. In percent identity calculations, relative weight is not assigned to various manifestations of sequence variation, such as insertions, deletions, substitutions, etc.

[0040] In one embodiment, only identities are scored positively (+1) and all forms of sequence variation including gaps are assigned a value of “0,” which obviates the need for a weighted scale or parameters as described below for sequence similarity calculations. Percent sequence identity can be calculated, for example, by dividing the number of matching identical residues by the total number of residues of the “shorter” sequence in the aligned region and multiplying by 100. The “longer” sequence is the one having the most actual residues in the aligned region.

[0041] As used herein, an “isolated” nucleic acid or nucleotide sequence (e.g., an “isolated DNA” or an “isolated RNA”) means a nucleic acid or nucleotide sequence separated or substantially free from at least some of the other components of the naturally occurring organism or virus, for example, the cell or viral structural components or other polypeptides or nucleic acids commonly found associated with the nucleic acid or nucleotide sequence.

[0042] As used herein, the term “nucleic acid” refers to a single or double-stranded polymer of deoxyribonucleotide or ribonucleotide bases read from the 5′ to the 3′ end. The “nucleic acid” may also optionally contain non-naturally occurring or modified nucleotide bases. The term “nucleotide sequence” or “nucleic acid sequence” refers to both the sense and antisense strands of a nucleic acid, either as individual single strands or in the duplex. The term “ribonucleic acid” (RNA) is inclusive of RNAi (inhibitory RNA), dsRNA (double stranded RNA), siRNA (small interfering RNA), shRNA (short/small hairpin RNA), mRNA (messenger RNA), miRNA (micro-RNA), tRNA (transfer RNA, whether charged or discharged with a corresponding acylated amino acid), long non-coding RNA (lncRNA), ribosomal RNA (rRNA), small nuclear RNA (snRNA), small nucleolar RNA (snoRNA) and CRNA (complementary RNA), and the term “deoxyribonucleic acid” (DNA) is inclusive of cDNA and genomic DNA and DNA-RNA hybrids.

[0043] As used herein, “HPV” refers to any human papillomavirus, including HPV strains 16, 18, 31, 33, 35, 39, 45, 51, 52, 56, 58, 59, 66, and 68. In particular embodiments, the HPV strain is HPV-16. As used herein, “positive for HPV” or “HPV-positive” means the subject and/or sample has been infected with the HPV virus.

[0044] As used herein, “p16” refers to the p16 gene, as well as gene products encoded and/or derived therefrom.

[0045] As used herein, OPSCC refers to “oropharyngeal squamous cell carcinoma,” a cancer commonly referred to as “throat cancer” and/or “tonsil cancer,” derived from the squamous epithelium lining the middle part of the pharynx (the oropharynx), extending vertically from the soft palate to the superior area of the hyoid bone and including the base and posterior of the tongue, the tonsils, soft palate, and posterior and lateral pharyngeal walls. OPSCC can be categorized into HPV-positive and HPV negative cancer, sometimes also referred to as p16 and/or HPV/p16-positive and negative cancer. p16 (also known as p16^{INK4a} and/or CDKN2A) is a cyclin-dependent kinase inhibitor and tumor suppressor protein encoded by the CDKN2A gene commonly used as a biomarker for epithelial neoplasia and optionally used as a proxy for HPV infection.

[0046] As used herein, a “genome product” refers to any material produced from the expression of a genome such as a viral genome, including but not limited to DNA, RNA (e.g., mRNA, miRNA, etc.), RNP, and proteins.

[0047] “Amino acid sequence” and terms such as “peptide”, “polypeptide”, and “protein” are used interchangeably herein, and are not meant to limit the amino acid sequence to the complete, native amino acid sequence (i.e., a sequence containing only those amino acids found in the protein as it occurs in nature) associated with the recited protein molecule.

[0048] As used herein, the terms “sequence information,” “nucleic acid sequencing information,” “nucleic acid sequencing data,” “sequence information,” “nucleic acid sequence,” “genomic sequence,” “genome sequence,” “genetic sequence,” “fragment sequence,” “nucleic acid sequencing read,” “read,” and the like denote any information or data that is indicative of the order of the nucleotide bases (e.g., adenine, guanine, cytosine, and thymine/uracil) in a molecule (e.g., whole genome, whole transcriptome, exome, oligonucleotide, polynucleotide, fragment, etc.) of DNA or RNA. It should be understood that the present teachings contemplate sequence information obtained using all available varieties of techniques, platforms or technologies, including, but not limited to: capillary electrophoresis, microarrays, ligation-based systems, polymerase-based systems, hybridization-based systems, direct or indirect nucleotide identification systems, pyrosequencing, ion- or pH-based detection systems, electronic signature-based systems, etc. Further examples of sequencing technologies include those described in, e.g., U.S. PGPub US/2020/0051663 and US/2020/0002747, incorporated herein by reference.

[0049] As used herein, the term “dataset” refers to a collection of related sets of information, i.e., data, attained from experimental or computational analyses, comprising any type of data, including but not limited to nucleic acid sequences or amino acid sequences (i.e., “sequence information”). The dataset may be screened and/or otherwise searched for particular data of interest depending on variable parameters as defined by each particular dataset. In some embodiments, the dataset is a nucleic acid dataset, i.e., a dataset comprising nucleic acid sequences. The source material (e.g., healthy subject(s) and/or patient(s)) may be alternatively referred to as a database, a repository, a reference group, a cohort, a library, or any similar terminology understood in the art.

[0050] In some embodiments, a dataset set of invention may be a collection of reference viral genomes, also referred to as a reference library. In some embodiments, a reference library may comprise two or more viral genomes (e.g., two or more reference viral genomes). The viral genomes may be known viral genomes and/or newly isolated and/or sequenced viral genomes, and as such a reference library may comprise the sequence information of known viral genomes and/or of newly sequenced viral genomes including any viral genomes not yet known and/or sequences. In some embodiments, a reference library of the present invention is a pre-existing reference library, de novo generated from newly sequenced viral genomes, or any combination thereof.

[0051] As used herein, the term “biomarker” can mean any chemical or biological entity that is produced by cells (e.g., cells of the subject), or substances that are produced by cells that might be then chemically modified by extracellular enzymes, free radicals produced by cells of the body and/or other naturally occurring processes and that is found, for example, in the saliva, urine, blood, vaginal secretion, tears, feces, sputum, hair, nails, skin, wound fluid, nasal swab, lymph, perspiration, oral mucosa, vaginal mucosa, or the anus, or in serum or plasma obtained from blood. In some embodiments, a biomarker of the present invention may be a polymorphism.

[0052] The terms “polymorphic” and “polymorphism” as used herein (e.g. genetic variation), refer to variation in the sequence of a gene in the genome or the encoded amino acid sequence thereof amongst a population, such as allelic variations and other variations that arise or are observed. Thus, a polymorphism refers to the occurrence of two or more genetically determined alternative sequences or alleles in a population. These differences can occur in coding and non-coding portions of the genome, and can be manifested or detected as differences in nucleic acid sequences and/or gene expression, including, for example, transcription, processing, translation, transport, protein processing, trafficking, DNA synthesis, expressed proteins, protein modifications, RNA expression modification, DNA and RNA methylation, regulatory factors that alter gene expression and DNA replication, other gene products or products of biochemical pathways or in post-translational modifications, and any other differences manifested amongst members of a population in genomic nucleic acid or organelle nucleic acids.

[0053] A polymorphic site or polymorphic position refers to a site in the nucleic acid sequence at which divergence occurs. Polymorphic markers include, but are not limited to, restriction fragment length polymorphisms, variable number of tandem repeats (VNTR's), hypervariable regions, minisatellites, dinucleotide repeats, trinucleotide repeats, tetranucleotide repeats and other repeating patterns, simple sequence repeats and insertional elements, such as Alu. Polymorphic forms also include different mendelian alleles for a gene. A single nucleotide polymorphism (SNP) refers to a polymorphism that arises as the result of a single base change (i.e., a single nucleotide position), such as an insertion, deletion or change in a base. The term “genotype” refers to a description of the alleles of a gene or genes contained in an individual or a sample.

[0054] When compared to a reference genome, a particular genotype (e.g., of a genome in an individual or sample) may be referred to as having more or less divergence from the reference sequence, relative to the number of polymorphisms comprise in the genome as compared to the reference genome. Divergence as compared to a reference genome may be expressed in qualitative and/or quantitative terms, such as but not limited to, as a number of polymorphisms (e.g., SNPs, non-synonymous (i.e., coding) polymorphisms, synonymous polymorphisms, all polymorphisms, or any combination thereof), relative and/or absolute copy number of any one or more polymorphisms as compared to the reference genome, as well as a direct and/or normalized comparison of nucleic acid sequence information of any one or more genome product, genome fragment, and/or total genome as compared to the reference genome (e.g., percent sequence identity, sequence identity score, various sequence distance scores, and the like). As used herein, relative terms of divergence such as a “low” divergence or a “high” divergence may correspond with a quantifiable amount of divergence. For example, in some embodiments a low divergence may comprise a divergence of less than or equal to 100, 99.9, 99.5, 99, 98, 97, 96, 95, 94, 93, 92, 91, 90, 89, 88, 87, 86, 85, 84, 83, 82, 81, 80, 79, 78, 77, 76, 75, 74, 73, 72, 71, 70, 69, 68, 67, 66, 65, 64, 63, 62, 61, 60, 59, 58, 57, 56, 55, 54, 53, 52, 51, 50, 49, 48, 47, 46, 45, 44, 43, 42, 41, 40, 39, 38, 37, 36, 35, 34, 33, 32, 31, 30, 29, 28, 27, 26, 25, 24, 23, 22, 21, 20, 19, 18, 17, 16, 15, 14, 13, 12, 11, 10, 9, 8, 7, 6, 5, 4, 3, 2, 1, 0.75, 0.5, 0.25, 0.10, 0.05, 0.01% from a reference genome, in terms of any of the above quantified sequence information variables (e.g., number of polymorphisms, copy number of polymorphisms, percent sequence identity, sequence identity score, various sequence distance scores and/or other sequence information). In some embodiments a high divergence may comprise a divergence of greater than or equal to 100, 99.9, 99.5, 99, 98, 97, 96, 95, 94, 93, 92, 91, 90, 89, 88, 87, 86, 85, 84, 83, 82, 81, 80, 79, 78, 77, 76, 75, 74, 73, 72, 71, 70, 69, 68, 67, 66, 65, 64, 63, 62, 61, 60, 59, 58, 57, 56, 55, 54, 53, 52, 51, 50, 49, 48, 47, 46, 45, 44, 43, 42, 41, 40, 39, 38, 37, 36, 35, 34, 33, 32, 31, 30, 29, 28, 27, 26, 25, 24, 23, 22, 21, 20, 19, 18, 17, 16, 15, 14, 13, 12, 11, 10, 9, 8, 7, 6, 5, 4, 3, 2, 1, 0.75, 0.5, 0.25, 0.10, 0.05, 0.01% from a reference genome, in terms of any of the above quantified sequence information variable. In some embodiments, a low divergence may comprise a divergence of less than or equal to a particular predetermined threshold for a relevant variable (e.g., number of polymorphisms, copy number of polymorphisms, percent sequence identity, sequence identity score, various sequence distance scores and/or other sequence information). In some embodiments, a “high” divergence may comprise a divergence of greater than or equal to such a predetermined threshold.

[0055] As used herein, the term “sample” is used in its broadest sense. In one sense, it is meant to include a specimen from a biological source. Biological samples can be obtained from animals (including humans) and encompass fluids (e.g., blood, mucus, urine, saliva), solids, tissues, cells, and gases. In some embodiments, the sample is obtained from a tumor (e.g., tumor stroma) in the subject. The sample may also comprise one or more immune cells, including T cells of the subject, including immune cells (e.g., helper T cells) from the tumor (e.g., tumor stroma) of the subject. Thus, in the methods of this invention, the sample can be any biological fluid or tissue that can be used in a method of this invention, including but not limited to, serum, plasma, blood, saliva, semen, lymph, cerebrospinal fluid, prostatic fluid, urine, sputum, oral mucosa, nasal mucosa, duodenal fluid, gastric fluid, skin, endothelium, biopsy material from a salivary gland, biopsy material of a parotid gland, biopsy material of other glands of the mouth, secretions of the salivary gland, secretions of the parotid gland, secretions of other glands of the mouth, joint fluid, body cavity fluid, tear fluid, anal secretions; vaginal secretions, perspiration, whole cells, cell extracts, tissue, biopsy material, aspirates, exudates, slide preparations, fixed cells, tissue sections, etc.

[0056] A “subject” of the invention may include any animal in need thereof. In some embodiments, a subject may be, for example, a mammal, a reptile, a bird, an amphibian, or a fish. A mammalian subject may include, but is not limited to, a laboratory animal (e.g., a rat, mouse, guinea pig, rabbit, primate, etc.), a farm or commercial animal (e.g., cattle, pig, horse, goat, donkey, sheep, etc.), or a domestic animal (e.g., cat, dog, ferret, gerbil, hamster etc.). In some embodiments, a mammalian subject may be a primate, or a non-human primate (e.g., a chimpanzee, baboon, macaque (e.g., rhesus macaque, crab-eating macaque, stump-tailed macaque, pig-tailed macaque), monkey (e.g., squirrel monkey, owl monkey, etc.), marmoset, gorilla, etc.). In some embodiments, a mammalian subject may be a human. The terms “subject” and “patient” are in some embodiments used interchangeably herein, such as but not limited to in reference to a human subject or patient.

[0057] A “subject in need” of the methods of the invention can be any subject known or suspected to have an HPV+ cancer such as OPSCC to which the methods of the present invention disclosed herein may provide beneficial health effects, or a subject having an increased risk of developing the same.

[0058] As used herein the term “control” refers to a comparative sample and/or other reference source for a control subject.

[0059] The terms “administering” and “administration” of a treatment to a subject include any route of introducing or delivering to a subject a compound to perform its intended function. Administration can be carried out by any suitable route, including orally, intranasally, parenterally (intravenously, intramuscularly, intraperitoneally, intracisternally, intrathecally, intraventricularly, or subcutaneously), or topically. Administration includes self-administration and administration by another.

[0060] By the terms “treat,” “treating,” and “treatment of” (or grammatically equivalent terms) it is meant that the severity of the subject's condition is reduced or at least partially improved or ameliorated and/or that some alleviation, mitigation or decrease in at least one clinical symptom is achieved and/or there is a delay in the progression of the condition and/or prevention or delay of the onset of a disease or disorder.

[0061] As used herein, the terms “prevent,” “prevents,” and “prevention” (and grammatical equivalents thereof) refer to a delay in the onset of a disease or disorder or the lessening of symptoms upon onset of the disease or disorder. The terms are not meant to imply complete abolition of disease and encompass any type of prophylactic treatment that reduces the incidence of the condition or delays the onset and/or progression of the condition.

[0062] A “treatment effective” amount as used herein is an amount that is sufficient to provide some improvement or benefit to the subject. Alternatively stated, a “treatment effective” amount is an amount that will provide some alleviation, mitigation, decrease or stabilization in at least one clinical symptom in the subject. Those skilled in the art will appreciate that the therapeutic effects need not be complete or curative, as long as some benefit is provided to the subject.

[0063] A “prevention effective” amount as used herein is an amount that is sufficient to prevent and/or delay the onset of a disease, disorder and/or clinical symptoms in a subject and/or to reduce and/or delay the severity of the onset of a disease, disorder and/or clinical symptoms in a subject relative to what would occur in the absence of the methods of the invention. Those skilled in the art will appreciate that the level of prevention need not be complete, as long as some benefit is provided to the subject.

[0064] The term “enhance” or “increase” refers to an increase in the specified parameter of at least about 1.25-fold, 1.5-fold, 2-fold, 3-fold, 4-fold, 5-fold, 6-fold, 8-fold, 10-fold, twelve-fold, or even fifteen-fold, and/or at least about 5%, 10%, 15%, 20%, 25%, 30%, 35%, 40%, 45%, 50%, 55%, 60%, 65%, 70%, 75%, 80%, 85%, 90%, 95%, or 100% or more, or any value or range therein.

[0065] The term “inhibit” or “reduce” or grammatical variations thereof as used herein refers to a decrease or diminishment in the specified level or activity of at least about 15%, 25%, 35%, 40%, 50%, 60%, 75%, 80%, 90%, 95% or more. In particular embodiments, the inhibition or reduction results in little or essentially no detectible activity (at most, an insignificant amount, e.g., less than about 10% or even 5%).

[0066] In some embodiments, a subject of the present invention may be administered standard (e.g., “therapeutic”) treatment for a relevant disorder of the invention, such as but not limited to, OPSCC. Standard therapeutic treatment regimens for HPV+ cancers such as OPSCC are known in the art and can be readily implemented by the skilled artisan (e.g., an oncologist). As used herein, the term “escalate” and the like (e.g., “escalated,” “escalation, etc.”) may be used to refer to standard (e.g., “therapeutic” level) treatment for the disorder, and/or to refer to a return to standard/therapeutic level treatment following prior lack of treatment (naïve) or other (e.g., de-escalated, alternative, supratherapeutic, etc.) treatment.

[0067] In some embodiments, a subject of the present invention may be administered “de-escalated” (e.g., “sub-therapeutic”) treatment for a relevant disorder of the invention, such as but not limited to, OPSCC. As used herein, the term “de-escalate” and the like (e.g., “de-escalated,” de-escalating,” etc.) refers to a reduction (e.g., to a decrease or diminishment in the specified dose or activity of at least about 15%, 25%, 35%, 40%, 50%, 60%, 75%, 80%, 90%, 95% or more) or elimination of a standard (e.g., “therapeutic”) treatment of the disorder (e.g., to a “sub-therapeutic” level of treatment). De-escalation may be inclusive of any one or more treatment(s) targeted to the disorder, in any combination, as well as de-escalation of an entire treatment regimen. In some embodiments, the de-escalation may be a reduction or elimination of, for example, radiation therapy, chemotherapy, immunotherapy, surgery, and/or intubation of the subject.

### Methods

[0068] This invention relates to human papilloma virus (HPV) positive cancers such as HPV⁺ squamous cell carcinoma of the oropharynx (OPSCC). This invention further relates methods of determining treatment regimens, methods of stratifying prognosis from treatment of HPV positive cancers, methods of determining suitability for de-escalation of treatment of HPV positive cancers, and methods of treating HPV positive cancers.

[0069] HPV subtype 16 (HPV16) is the most common high-risk HPV causing OPSCC. There are four main variant lineages (A, B, C, D) and at least 10 known sub-lineages (A1, A2, A3, A4, B1, B2, C, D1, D2, D3) of HPV16. Formerly, these sub-lineages were geographically termed European (A1-3), Asian (A4), African-1 (B), African-2 (C), and North-American/Asian-American (D1-3). Lineages are defined by 1-10% differences and sub-lineages defined by 0.5-1% differences in the L1 (capsid protein) sequence (Smith B, Chen Z, Reimers et al. PLOS ONE. 2011; 6(6): e21375; Burk et al. Virology. 2013; 445(1-2):232-243; Mirabello et al. J Natl Cancer Inst. 2016; 108(9)).

[0070] Along with OPSCC and other anogenital cancers, HPV16 is also the most common high-risk HPV associated with cervical cancer. HPV16 sub-lineage classification of cervical cancer has indicated that though lineage A1 is most prevalent, non-A HPV16 lineages (B/C/D) are associated with a higher risk of precancer and cancer (Burk 2013; Mirabello 2016). HPV16 lineage D variants are thought to be associated with the highest rate of persistent infection and progression to cervical cancer compared with other variants.

[0071] HPV16 viral oncoproteins E6 and E7 bind to p53 and pRb, respectively, and contribute to carcinogenesis and inhibition of apoptosis and entry of cell into the S phase. The E6 L83V polymorphism has been associated with infection persistence and progression of cervical carcinoma within the A1-3 sub-lineages. However, few studies have examined HPV16+ OPSCC.

[0072] RNA sequencing data have been used to determine HPV positivity and viral genome integration (Cancer Genome Atlas Network. Comprehensive genomic characterization of head and neck squamous cell carcinomas. Nature. 2015; 517(7536):576-582. HPV integration in OPSCC has been reported to correlate with genomic methylation and tumor mutational burden (Parfenov et al. Proc Natl Acad Sci USA. 2014; 111(43):15544-15549), genomic instability (Akagi et al. Genome Res. 2014; 24(2):185-199), HPV gene expression (Walline et al. Mol Cancer Res MCR. 2016; 14(10):941-952), and tumor immune landscape and survival (Koneva et al. Mol Cancer Res MCR. 2018; 16(1):90-102).

[0073] HPV+ OPSCC has an improved prognosis compared to non-HPV OPSCC, however, treatment can carry significant, lifelong therapeutic toxicity. De-escalation of therapy represents an effort to limit morbidity while preserving tumor control (Cheraghlou et al. Cancer. 2018; 124(4):717-726; Chera et al. Cancer. 2018; 124(11):2347-2354; Chera et al. Clin Cancer Res Off J Am Assoc Cancer Res. 2019; 25(15):4682-4690; Marur et al. J Clin Oncol Off J Am Soc Clin Oncol. 2017; 35(5):490-497), however, initial results have been mixed and there are few available tools to select appropriate patients with favorable prognosis.

[0074] Thus, one aspect of the invention relates to a method of determining a treatment regimen for a subject having HPV positive (HPV+) cancer (e.g., OPSCC) or a subject at risk for or suspected to have or develop HPV+ cancer (e.g., OPSCC), comprising: a) obtaining a sample from the subject; b) detecting a level of expression of HPV virus genome and/or genome product in the sample; c) obtaining sequence information of the HPV viral genome and/or genome product in the sample; d) comparing the sequence information obtained in c) to a reference HPV viral genome; and e) determining the prognosis of the subject upon treatment to the cancer, wherein a low divergence of the sequence information of the detected HPV virus genome and/or genome product as compared to the reference HPV viral genome identifies the subject as a candidate for standard (e.g., “therapeutic”) treatment for OPSCC, and wherein a greater divergence identifies the subject as a suitable candidate for de-escalated (e.g., “sub-therapeutic”) treatment for the cancer.

[0075] Another aspect of the invention relates to a method of stratifying prognosis from treatment of HPV+ cancer in a subject having HPV+ cancer or a subject at risk for or suspected to have or develop HPV+ cancer, comprising: a) obtaining a sample from the subject; b) detecting a level of expression of HPV virus genome and/or genome product in the sample; c) obtaining sequence information of the HPV viral genome and/or genome product in the sample; d) comparing the sequence information obtained in c) to a reference HPV viral genome; and e) stratifying the prognosis of the subject upon treatment to the cancer, wherein a low divergence of the sequence information of the detected HPV virus genome and/or genome product as compared to the reference HPV viral genome categorizes the subject as having elevated risk of poor prognosis from de-escalated (e.g., “sub-therapeutic”) treatment to the cancer, and wherein a greater divergence categorizes the subject as having reduced risk of poor prognosis from de-escalated treatment to the cancer.

[0076] Another aspect of the invention relates to a method of determining suitability for de-escalation of treatment of human papillomavirus (HPV) positive cancer in a subject having human papillomavirus (HPV) positive (HPV+) cancer or a subject at risk for or suspected to have or develop HPV+ cancer, comprising: a) obtaining a sample from the subject; b) detecting a level of expression of HPV virus genome and/or genome product in the sample; c) obtaining sequence information of the HPV viral genome and/or genome product in the sample; d) comparing the sequence information obtained in c) to a reference HPV viral genome; and e) determining the prognosis of the subject upon treatment to the cancer, wherein a greater divergence identifies the subject as a suitable candidate for de-escalated (e.g., “sub-therapeutic”) treatment for the cancer.

[0077] In some embodiments, a low divergence identifies the subject as not a suitable candidate for de-escalated treatment for the cancer; e.g., identifies the subject as having elevated risk of poor prognosis from de-escalated treatment to cancer.

[0078] In some embodiments, methods of the present invention may further comprise treating the subject identified as a suitable candidate for de-escalated treatment and/or having reduced risk of poor prognosis with de-escalated treatment to the cancer.

[0079] Another aspect of the invention relates to a method of de-escalating treatment of human papillomavirus (HPV) positive cancer in a subject having human papillomavirus (HPV) positive (HPV+) cancer or a subject at risk for or suspected to have or develop HPV+ cancer and undergoing standard (e.g., “therapeutic,” “escalated”) treatment of the cancer, comprising: a) obtaining a sample from the subject; b) detecting a level of expression of HPV virus genome and/or genome product in the sample; c) obtaining sequence information of the HPV viral genome and/or genome product in the sample; d) comparing the sequence information obtained in c) to a reference HPV viral genome; e) identifying the risk of poor prognosis of the subject from de-escalated treatment to the cancer, wherein a low divergence of the sequence information of the detected HPV virus genome and/or genome product as compared to the reference HPV viral genome categorizes the subject as having elevated risk of poor prognosis from de-escalated (e.g., “sub-therapeutic”) treatment to the cancer, and wherein a greater divergence categorizes the subject as having reduced risk of poor prognosis from de-escalated treatment to the cancer; and f) treating the subject having reduced risk of poor prognosis with de-escalated treatment as compared to standard treatment for the cancer.

[0080] Another aspect of the invention relates to a method of treating human papillomavirus (HPV) positive (HPV+) cancer in a subject having human papillomavirus (HPV) positive (HPV+) cancer or a subject at risk for or suspected to have or develop HPV+ cancer, comprising: a) obtaining a sample from the subject; b) detecting a level of expression of HPV virus genome and/or genome product in the sample; c) obtaining sequence information of the HPV viral genome and/or genome product in the sample; d) comparing the sequence information obtained in c) to a reference HPV viral genome; e) identifying the risk of poor prognosis of the subject from de-escalated treatment to the cancer, wherein a low divergence of the sequence information of the detected HPV virus genome and/or genome product as compared to the reference HPV viral genome categorizes the subject as having elevated risk of poor prognosis from de-escalated (e.g., “sub-therapeutic”) treatment to the cancer, and wherein a greater divergence categorizes the subject as having reduced risk of poor prognosis from de-escalated treatment to the cancer; and f) treating the subject identified as having reduced risk of poor prognosis from de-escalated treatment with de-escalated treatment as compared to standard (e.g., “therapeutic”) treatment for the cancer.

[0081] The sequence information of the HPV viral genome and/or genome product of the invention may be obtained by any suitable method known in the art, including but not limited to standard nucleic acid sequencing methods as will be apparent to one skilled in the art upon review of the present disclosure. Many methods are known in the art for obtaining sequence information and are within the scope of the presently disclosed subject matter, including but not limited to whole genome (e.g., viral genome) sequencing, Sanger sequencing, next-generation sequencing (NGS), high-throughput sequencing, pyrosequencing (“454” sequencing), sequencing by ligation (SOLID sequencing), nanopore sequencing, polony sequencing, massively parallel signature sequencing (MPSS), iIllumina sequencing, metagenomic sequencing, polymerase chain reaction (PCR) amplification sequencing, target enrichment sequencing, RNA sequencing (RNAseq), chromatin-immunoprecipitation sequencing (chIP-seq), and shotgun sequencing. In some embodiments, obtaining sequence information of the HPV viral genome and/or genome product in the sample may comprise obtaining RNA and/or DNA sequence information.

[0082] In some embodiments of the methods of the invention, the comparing step (e.g., of comparing the sequence information obtained to a reference HPV viral genome) may comprise identifying one or more polymorphism(s) of the detected HPV virus genome and/or genome product and comparing the identified one or more polymorphism(s) to polymorphisms of the reference HPV viral genome, wherein a divergence of 17 or fewer (e.g., 17, 16, 15, 14, 13, 12, 11, 10, 9, 8, 7, 6, 5, 4, 3, 2, 1, or fewer, or any value or range therein) polymorphisms (e.g., single-nucleotide polymorphisms (SNPs) and/or non-synonymous polymorphisms) of the detected HPV virus genome and/or genome product as compared to the reference HPV viral genome categorizes the subject as having elevated risk of poor prognosis from de-escalated treatment to the cancer, and wherein a divergence of 18 or more (e.g., 18, 19, 20, 21, 22, 23, 24, 25, 26, 27, 28, 29, 30 or more, or any value or range therein) polymorphisms (e.g., single-nucleotide polymorphisms (SNPs) and/or non-synonymous polymorphisms) to the reference HPV viral genome categorizes the subject as having reduced risk of poor prognosis from de-escalated treatment to the cancer.

[0083] In some embodiments, a low diverge of the detected HPV virus genome and/or genome product may be a divergence of 17 (e.g., 17, 16, 15, 14, 13, 12, 11, 10, 9, 8, 7, 6, 5, 4, 3, 2, 1, or fewer, or any value or range therein) polymorphisms of any kind as compared to the reference HPV viral genome, e.g., SNPs, non-synonymous (i.e., coding) polymorphisms, synonymous polymorphisms, or any combination thereof. In some embodiments, a low diverge of the detected HPV virus genome and/or genome product may be a divergence of 8 (e.g., 8, 7, 6, 5, 4, 3, 2, 1, or fewer, or any value or range therein) non-synonymous polymorphisms of the detected HPV virus genome and/or genome product as compared to the reference HPV viral genome.

[0084] In some embodiments of the methods of the invention, the comparing step (e.g., of comparing the sequence information obtained to a reference HPV viral genome) may comprise performing statistical and/or probabilistic analyses which may indicate a relative relationship to (“near” or “far”) the reference HPV viral genome. Upon review of the present disclosure, those skilled in the art will be familiar with numerous statistical and/or probabilistic analyses and variations thereof that can be useful for carrying out the methods of the presently disclosed subject matter. For example, in some embodiments, a nearest neighbor analysis may be useful for carrying out the methods of the invention. As used herein, the term “nearest neighbor,” nearest neighbor distribution,” “nearest neighbor function,” and the like refer to a mathematical function that is defined in relation to a point process, representable as randomly positioned points in time, space or both. Nearest neighbor functions are defined with respect to some point in the point process as being the probability distribution of the distance from this point to its nearest neighboring point in the same point process, and accordingly describe the probability of another point existing within some distance of a particular point.

[0085] Accordingly, in some embodiments of the methods of the invention, the comparing step (e.g., of comparing the sequence information obtained to a reference HPV viral genome) may comprise determining a nearest neighbor distribution of the detected HPV virus genome and/or genome product as compared to the reference HPV viral genome, wherein a nearest neighbor distribution of the sequence information of the detected HPV virus genome and/or genome product less than a predetermined threshold as compared to (“grouping with”) the reference HPV viral genome categorizes the subject as having elevated risk of poor prognosis from de-escalated treatment to the cancer, and wherein a nearest neighbor distribution equal to or greater than the pre-determined threshold as compared to (e.g., “grouping outside” of) the reference HPV viral genome categorizes the subject as having reduced risk of poor prognosis from de-escalated treatment to the cancer.

[0086] In some embodiments of the methods of the invention, the comparing step (e.g., of comparing the sequence information obtained to a reference HPV viral genome) may comprise calculating a sequence distance (e.g., identity score and/or % sequence identity) of the sequence information of the detected HPV virus genome and/or genome product as compared to the reference HPV viral genome, wherein a sequence distance equal to or less than a pre-determined threshold of the detected HPV virus genome and/or genome product as compared to (e.g., “near” to) the reference HPV viral genome categorizes the subject as having elevated risk of poor prognosis from de-escalated treatment to the cancer, and wherein a sequence distance greater than the pre-determined threshold of the detected HPV virus genome and/or genome product as compared to (e.g., “far” from) the reference HPV viral genome categorizes the subject as having reduced risk of poor prognosis from de-escalated treatment to the cancer.

[0087] In some embodiments of the methods of the invention, the comparing step (e.g., of comparing the sequence information obtained to a reference HPV viral genome) may comprise any combination of the above methods of comparing.

[0088] In some embodiments, the pre-determined threshold for the nearest neighbor distribution and/or the sequence distance is determined by a phylogenetic analysis (e.g., maximum parsimony phylogenetic analysis) of the reference HPV viral genome, wherein the HPV viral genome is a reference library (e.g., a de novo reference library, e.g., a pre-existing reference library) comprising a multitude of (e.g., at least two or more) reference HPV viral genomes.

[0089] In some embodiments, the phylogenetic analysis establishes at least two or more groups, wherein at least one group includes a HPV A1 reference genome (e.g., the “in-group,” the “high risk group”), and wherein at least one group does not include a HPV A1 reference genome (e.g., the “out-group,” the “low risk group”).

[0090] In some embodiments, the low risk group may include but is not limited to any one of the following HPV genomes (e.g., HPV reference genomes) which sequences are provided in the SEQUENCES section, in any combination thereof: “UNCseq1628” SEQ ID NO:13, “UNCseq1770” SEQ ID NO:23, “UNCseq2162” SEQ ID NO:58, “UNCseq1750” SEQ ID NO: 22, “UNCseq1864” SEQ ID NO:30, “UNCseq1867” SEQ ID NO:31, “UNCseq2234” SEQ ID NO:62, “UNCseq2491” SEQ ID NO:80, “UNCseq2539” SEQ ID NO:82, “UNCseq2012” SEQ ID NO:48, “UNCseq2554” SEQ ID NO:83, “UNCseq2771” SEQ ID NO: 93, “UNCseq1796” SEQ ID NO:25, “UNCseq0733” SEQ ID NO: 1, “UNCseq2051” SEQ ID NO: 52, “UNCseq2789” SEQ ID NO: 102, “UNCseq2106” SEQ ID NO:56, “UNCseq1742” SEQ ID NO:20, “UNCseq1140” SEQ ID NO:4, “UNCseq1849” SEQ ID NO: 28, “UNCseq1980” SEQ ID NO:41, “UNCseq2005” SEQ ID NO:45, “UNCseq2105” SEQ ID NO:55, “UNCseq1360” SEQ ID NO:6, “UNCseq1525” SEQ ID NO:7, “UNCseq1891” SEQ ID NO:32, “UNCseq1662” SEQ ID NO: 14, “UNCseq1924” SEQ ID NO: 36, “UNCseq2292” SEQ ID NO:66, “UNCseq1994” SEQ ID NO:43, “UNCseq2007” SEQ ID NO:46, “UNCseq1834” SEQ ID NO:26, “UNCseq2783” SEQ ID NO:100, “UNCseq2786” SEQ ID NO:101, “UNCseq1693” SEQ ID NO:66, “UNCseq2033” SEQ ID NO: 51, “UNCseq0848” SEQ ID NO:2, “UNCseq2249” SEQ ID NO:63, “UNCseq2794” SEQ ID NO: 106, “UNCseq2393” SEQ ID NO: 72, “UNCseq2576” SEQ ID NO:84, “UNCseq2795” SEQ ID NO: 107, “UNCseq1697” SEQ ID NO: 17, “UNCseq1938” SEQ ID NO: 38, “UNCseq1991” SEQ ID NO:42, GenBank® Accession Nos. AF536179.1 (HPV16 A2), HQ644236.1 (HPV16 A3), AF534061.1 (HPV16 A4), AF536180.1 (HPV16 B1), KU053915.1 (HPV16 B2), HQ644298.1 (HPV16 B3), KU053914.1 (HPV16 B4), AF472509.1 (HPV16 C1), HQ644244.1 (HPV16 C2), KU053920.1 (HPV16 C3), KU053925.1 (HPV16 C4), HQ644257.1 (HPV16 D1), AY686579.1 (HPV16 D2), AF402678.1 (HPV16 D3), KU053931.1 (HPV16 D4), and/or any of SEQ ID NOs: 108-123, in any combination thereof.

[0091] In some embodiments, the high risk group may include any HPV genomes (e.g., HPV reference genomes) which sequences are provided in the SEQUENCES section other than those listed above, in any combination thereof, including but not limited to HPV16 A1.

[0092] In some embodiments, the high risk group is defined as inclusive of any viral genome with a divergence of 17 or fewer (e.g., 17, 16, 15, 14, 13, 12, 11, 10, 9, 8, 7, 6, 5, 4, 3, 2, 1, or fewer, or any value or range therein) polymorphisms (e.g., single-nucleotide polymorphisms (SNPs) and/or non-synonymous polymorphisms) as compared to the reference HPV viral genome.

[0093] In some embodiments, the high risk group is defined as inclusive of any viral genome with a divergence of 8 or fewer (e.g., 17, 16, 15, 14, 13, 12, 11, 10, 9, 8, 7, 6, 5, 4, 3, 2, 1, or fewer, or any value or range therein) non-synonymous polymorphisms as compared to the reference HPV viral genome.

[0094] The sequence distance score may be calculated by any suitable method known in the art. In some embodiments, the sequence distance score is calculated according to JC69 or F81 sequence distances.

[0095] Polymorphisms relevant to the present invention include any known or as yet discovered polymorphisms between a relevant HPV genome and the reference HPV viral genome of HPV16 A1 strain GenBank® Accession No. NC_001526.4. In some embodiments, the one or more polymorphism(s) of the invention comprise all polymorphisms, single nucleotide polymorphisms (SNPs), non-synonymous (i.e., coding) polymorphisms, synonymous polymorphisms, or any combination thereof. For example, in some embodiments, the one or more polymorphism(s) comprise non-synonymous polymorphisms and/or SNPs. In some embodiments, the one or more polymorphism(s) comprises non-synonymous polymorphisms. In some embodiments, the one or more polymorphism(s) comprise any one or more of E5 I44L, E5 I65V, E2 P219S, L1 T266A, L2 L330F, E6 L90V, E1 S220T, L2 S269P, E2 T310K, E2 I210T, L1 T353P, E2 E232K, E2 A143T, L2 I420T, or E2 N203D polymorphisms, any one of the polymorphisms of FIG. 3, any other polymorphism disclosed herein, and any combination thereof.

[0096] In some embodiments of the methods of the present invention, the identifying step (e.g., identifying one or more polymorphism(s) of the detected HPV virus genome and/or genome product and comparing the identified polymorphisms to polymorphisms of the reference HPV viral genome) comprises identifying the presence of one or more of a subset of specific polymorphisms in the detected HPV virus genome and/or genome product and comparing the identified polymorphisms to the presence of the subset of specific polymorphisms in the reference HPV viral genome, wherein a divergence of less than about 8 (e.g., about 5, 6, 7, 8, 9, 10 or more) polymorphisms of the detected HPV virus genome and/or genome product as compared to the reference HPV viral genome categorizes the subject as having elevated risk of poor prognosis from de-escalated treatment to the cancer, and wherein a divergence of greater than about 8 polymorphisms (e.g., about 5, 6, 7, 8, 9, 10 or more) to the reference HPV viral genome categorizes the subject as having reduced risk of poor prognosis from de-escalated treatment to the cancer. The subset of specific polymorphisms may comprise any known polymorphism of interest and/or a polymorphism not yet known or discovered. In some embodiments, the subject of specific polymorphisms may include, but is not limited to, E5 I44L, E5 I65V, E2 P219S, L1 T266A, L2 L330F, E6 L90V, E1 S220T, L2 S269P, E2 T310K, E2 I210T, L1 T353P, E2 E232K, E2 A143T, L2 I420T, or E2 N203D polymorphisms, any one of the polymorphisms of FIG. 3, any other polymorphism disclosed herein, and any combination thereof.

[0097] The polymorphisms described above and elsewhere herein are denoted by [protein name, residue position relative to that protein], wherein the numbering corresponds to the relevant amino acid sequence encoded by the reference HPV viral genome of HPV16 A1 strain GenBank® Accession No. NC_001526.4. However it would be readily understood by one of ordinary skill in the art that the equivalent amino acid positions in other HPV virus amino acid sequences or other HPV virus genome sequences can be readily identified and employed in the utilization of this invention.

[0098] Standard therapeutic treatment regimens for HPV+ cancers such as OPSCC are known in the art and can be readily implemented by the skilled artisan (e.g., an oncologist). De-escalation (“sub-therapeutic”) of standard (“therapeutic”) may comprise a reduction of any standard treatment for a particular disorder which reduces an undesirable side effect of the standard therapeutic dose of said treatment. In some embodiments, de-escalated treatment comprises treating the subject with no and/or a reduced amount (e.g., 5%, 10%, 15%, 20%, 30%, 40%, 50%, 60%, 70%, 80%, 90% reduced amount or any value or range therein) as compared to standard treatment.

[0099] In some embodiments, de-escalated treatment of HPV+ OPSCC comprises treating the subject with no and/or a reduced amount (e.g., 5%, 10%, 15%, 20%, 30%, 40%, 50%, 60%, 70%, 80%, 90% reduced amount or any value or range therein) as compared to standard treatment of one or more treatments including but not limited to radiation therapy, chemotherapy, immunotherapy, surgery, and/or intubation of the subject.

[0100] In some embodiments, de-escalated treatment to the cancer comprises reducing the effective amount of chemotherapy administered to the subject (e.g., reducing the effective amount to about 5% to about 30% of the effective amount of chemotherapy; e.g., wherein de-escalated treatment to OPSCC comprises treating the subject with a sub-therapeutic amount (e.g., about 5% to about 30% of the effective amount) of chemotherapy.

[0101] In some embodiments, de-escalated treatment to the cancer comprises reducing the effective amount of radiation therapy administered to the subject (e.g., reducing the effective amount to about 5% to about 30% of the effective amount or radiation therapy; e.g., wherein de-escalated treatment to OPSCC comprises treating the subject with a sub-therapeutic amount (e.g., about 5% to about 30% of the effective amount) of radiation therapy.

[0102] In some embodiments, de-escalated treatment to the cancer (e.g., HPV+ cancer, e.g., HPV+ OPSCC) comprises not performing surgery for removal of cancerous and/or precancerous tissue on the subject.

[0103] In some embodiments, the subject is receiving and/or has previously received standard (e.g., “therapeutic,” “escalated”) treatment for the cancer (e.g., HPV+ cancer, e.g., HPV+ OPSCC).

[0104] In some embodiments, the subject is not receiving and/or has not previously received standard (e.g., “therapeutic,” “escalated”) treatment for the cancer (i.e., wherein the subject is treatment naïve).

[0105] In some embodiments, the subject is newly diagnosed has having cancer (e.g., HPV+ cancer, e.g., HPV+ OPSCC).

[0106] The HPV virus genome and/or genome product in the sample may comprise the genome and/or any genome product of any human papillomavirus, including but not limited to HPV strains 16, 18, 31, 33, 35, 39, 45, 51, 52, 56, 58, 59, 66, and 68. In some embodiments, the HPV virus genome and/or genome product in the sample comprises the genome and/or a genome product of a strain of HPV16 (e.g., sub-lineage(s) HPV16 A1, HPV16 A2-3, HPV16B1-4, HPV16 C1-4, and/or HPV16 D1-4).

[0107] The reference HPV viral genome may be any HPV viral genome of use as a reference for the utilization of the methods of this invention. In some embodiments, the reference HPV viral genome comprises a “high risk” HPV viral genome (e.g., an HPV viral genome encompassed in the high risk group, per phylogenetic analysis).

[0108] In some embodiments, the reference HPV viral genome comprises one or more reference HPV viral genomes (e.g., a reference library including but not limited to a de novo prepared reference library and/or a pre-existing reference library, e.g., UNCseq database).

[0109] In some embodiments, the reference HPV viral genome comprises the viral genome(s) of HPV strain GenBank® Accession No. NC_001526.4 (HPV16 A1, also numerated as K02718.1), AF536179.1 (HPV16 A2), HQ644236.1 (HPV16 A3), AF534061.1 (HPV16 A4), AF536180.1 (HPV16 B1), KU053915.1 (HPV16 B2), HQ644298.1 (HPV16 B3), KU053914.1 (HPV16 B4), AF472509.1 (HPV16 C1), HQ644244.1 (HPV16 C2), KU053920.1 (HPV16 C3), KU053925.1 (HPV16 C4), HQ644257.1 (HPV16 D1), AY686579.1 (HPV16 D2), AF402678.1 (HPV16 D3), KU053931.1 (HPV16 D4), any one of the sequences provided in the SEQUENCES section or any combination thereof.

[0110] In some embodiments, the reference HPV viral genome comprises, consists essentially of, or consists of the viral genome of HPV16 A1 strain GenBank® Accession No. NC_001526.4.

[0111] In some embodiments, the sample comprises a biopsy sample, blood sample, saliva sample, oral washing sample, and/or a direct tumor brushing/swabbing sample.

[0112] In some embodiments, the cancer is any HPV+ carcinoma, such as but not limited to HPV+ throat cancer and/or cervical cancer. In some embodiments, the cancer is HPV+ oropharyngeal squamous cell carcinoma (OPSCC).

[0113] The invention will now be described with reference to the following examples. It should be appreciated that these examples are not intended to limit the scope of the claims to the invention but are rather intended to be exemplary of certain embodiments. Any variations in the exemplified methods that occur to the skilled artisan are intended to fall within the scope of the invention.

### EXAMPLES

### Example 1: Comprehensive Viral Genotyping Reveals Prognostic Viral Phylogenetic Groups in HPV16 Associated Squamous Cell Carcinoma of the Oropharynx

[0114] Briefly, in order to develop prognostic biomarkers to identify appropriately low-risk patients for reduced treatment intensity in patients with HPV-positive (HPV+) squamous cell carcinoma of the oropharynx (OPSCC), targeted DNA sequencing including all HPV16 open reading frames was performed on tumors from 104 patients with HPV16+ OPSCC treated at a single center. Genotypes closely related to HPV16-A1 were associated with increased numbers of somatic copy-number variants in the human genome. Genotypes divergent from HPV16-A1 were strongly associated with favorable recurrence-free survival as compared to HPV16-A1 (or similar genotype); this finding was independent of tobacco smoke exposure. Total RNA sequencing was performed on a second cohort of 89 HPV16+ OPSCC cases. HPV16 genotypes divergent from HPV16-A1 were again validated in this independent cohort, to be strongly prognostic of improved RFS in patients with moderate (less than 30 pack-years) or low (no more than 10 pack-years) of tobacco smoke exposure. Genotypes divergent from HPV16-A1 were also associated with lower rates of viral integration in tumors from patients with low tobacco smoke exposure. Sequence divergence from the HPV16-A1 reference sequence to be strongly correlated with improved recurrence-free survival in patients with moderate or low tobacco smoke exposure in two independent cohorts.

[0115] In detail, to examine the diversity of HPV16 oncogenic genotypes promoting OPSCC in the study cohort, polymorphisms with variant allele frequency >0.9 were considered to be clonal. Based on clonal polymorphisms alone, HPV16 coding genotypes were highly diverse, with 93 distinct protein coding HPV16 genomes amongst the 104 tumors examined. To assess selective pressure for protein sequence conservation, the ratio of coding to synonymous clonal sequence variants were considered. All polymorphisms relative to the HPV16 A1 reference were considered, as well as uncommon polymorphisms, defined as polymorphisms identified in less than 25% of tumors. Based on these metrics, E1\hat{ }E4 and E2 demonstrated the least conservation amongst all viral genes (FIG. 2 panels A-B). Consistent with expectations from the uterine cervical carcinoma literature, E7 demonstrated a high degree of conservation with few nonsynonymous polymorphisms (Mirabello et al. Cell. 2017; 170(6):1164-1174.e6; Arroyo-Mühr et al. Br J Cancer. 2018; 119(9):1163-1168).

[0116] The viral sequencing data had an average depth of coverage of the HPV16 genome of ˜8,000, enabling analysis of sub-clonal genomic variants (FIG. 9). Despite the robust detection of sub-clonal variants, the bulk of genomic diversity was clonal with 1295 clonal coding (missense) polymorphisms vs. 144 sub-clonal coding polymorphisms. From 104 tumors, there were 285 unique (only present in one tumor) clonal non-synonymous variants. Sub-clonal variants demonstrated modest but detectable differences in distribution amongst HPV genes and were much more likely to cause protein-coding changes (FIG. 2 panels C-D). Considering prior reports supporting the relative importance of APOBEC-mediated mutagenesis in HPV+ OPSCC, APOBEC was investigated as a potential driver of HPV16 polymorphisms in OPSCC. Interestingly, polymorphisms corresponding to APOBEC deamination targets represented a minority of all clonal HPV polymorphisms identified (9.8%). However, 35.4% of sub-clonal variants (VAF <90%) were potentially APOBEC related (FIG. 2 panel E). This is consistent with expectations from analysis of cancerous and pre-malignant lesion of the uterine cervix, where APOBEC has been found to induce a minority of the lineage-defining SNPs, but sub-clonal APOBEC related variants are highly associated with viral clearance and failure of lesions to progress to invasive carcinoma (Revathidevi et al. Cancer Lett. 2021; 496:104-116; Zhu et al. Nat Commun. 2020; 11(1):886).

### HPV16 Sub-Lineage, Common Polymorphisms, and Viral Copy Loss:

[0117] HPV16 sub-lineage was also defined by the nearest HPV16 sub-lineage reference sequence in sequence space as determined by the Jukes and Cantor (JC69) (Jukes and Cantor. CHAPTER 24-Evolution of Protein Molecules. In: Munro H N, ed. Mammalian Protein Metabolism. Academic Press; 1969:21-132). Sixteen sub-lineages were queried based on contemporary studies (FIG. 3 panel A). HPV16-A1 genotype accounted the majority of (71%) tumors investigated. Eleven other tumors (13%) harbored A2-3 HPV16 and sub-lineages D1-3 were also represented by 11 tumors (13%). Maximum parsimony phylogenetic analysis based on all clonal SNPs grouped HPV16 oncogenic genomes, resulted in groups that were highly related in terms of HPV16 sub-lineage, common non-synonymous polymorphisms, and sequence divergence from HPV16 were all highly correlated.

[0118] Review of patient factors identified two patients presented with distant metastases and were treated with palliative intent; therefore 96 patients were available for analysis of recurrence-free-survival (RFS). The A1 sub-lineage was highly associated with poor recurrence-free survival (FIG. 3 panel B). This association persisted in a multivariate regression model including non-HPV16A1 genotype (HR=0.09, 95% CI=0.01-0.73, p-value=0.02), early vs. advanced AJCC8 summary stage (HR=1.4, 95% CI=0.38-4.8, p-value=0.64), and smoking exposure greater than 10 pack-years (HR=1.8, 95% CI=0.66-4.8, p-value=0.25).

[0119] Despite known associations of clinical stage and tobacco smoke exposure with outcome, there was no detectable association to viral sub-lineage (FIG. 3 panels D and E). Hypothesizing that some viral proteomes are more immunogenic, the number of high affinity (<325 nM) viral peptide/MHC interactions that would be expected given the individual patient's viral genotype and MHC subtype were estimated. No difference in antigenicity was identified between peptides encoded by the A1 vs. other sub-lineages (FIG. 3 panel E). Analysis of other thresholds and rank-based metrics of MHC peptide affinity also failed to yield and identifiable relationship to HPV16 genotype. The total number of copy-altered regions identified in the human genome (ref 32). The A1 sub-lineage correlated with the number of genomic CNVs (p=0.006, Wilcoxen Rank-sum test). Follow-up time, race, patient age, patient sex, treatment modality, and anatomic site of tumor origin were also examined, stratified according to HPV16 sub-lineage, (Table 1). There was a trend towards more white patients in the A1, high-risk group. Follow up time was longer in the non-A1, low-risk group.

[0120] The prevalence of common coding polymorphisms in HPV+ OPSCC was compared to a population matched (same center and time period) cohort of 44 HPV16+ uterine cervical squamosa cell carcinomas (UCSCC), sequenced with the same technique. The prevalence of common (clonal) coding polymorphisms were similar between HPV+ OPSCC and uterine cervical carcinoma (FIG. 3 panel H). There was a trend toward Non-A1 HPV16 sub-lineages being more common in the uterine cervical carcinoma (FIG. 3 panel G).

[0121] In 14/104 tumors, deep copy loss (depth of coverage <1% of that of tumor matched average E7 coverage) of a portion of the HPV genome was noted (excluding the non-coding hypervariable region 3150-3351). These losses, however, represented only 1.2% of all potential genomic space (tumor HPV bases) interrogated. In only 2 of 104 cases (1.9%), genomic regions with deep loss accounted for more than 10% of the viral genome (75%, 47%). These large genomic losses are likely to be related to (clonal) genomic integration of the HPV16 viral genome. Although integration events can be present as sub-clonal genomic variation, deep loss of large segments of the HPV16 genome was quite uncommon in HPV+OPSCC (FIG. 2 panel I). Similarly, only 6 of 104 (5.7%) tumors harbored deep losses of E2 of any size. Fourteen of 44 (32%) HPV16 positive tumors of the uterine cervix sequenced with the same strategy had deep loss involving E2. The difference in proportion of tumors harboring E2 loss between HPV16+ OPSCC (5.7%) and HPV16+UCSCC (32%) was significant (p<1*10\hat{ }-4, Chi squared test) (FIG. 2 panel I). Large scale losses (>10% of the viral genome) were also more common in UCSCC (p<1*10\hat{ }-4, Chi squared test) (FIG. 2 panel I).

### Phylogenetic Analysis:

[0122] Based on the clonal SNPs, relative to the HPV16-A1 reference, full HPV16 genotypes were reconstructed for each tumor. This approach may bias the few (n=2) cases with large areas of deep copy loss as being closer to the A1 reference sequence, as A1 reference is assumed for uncovered bases. To organize the sequence diversity, a maximum parsimony phylogenetic model was implemented. Common non-synonymous polymorphisms were highly correlated with the substructure of the phylogenetic tree. The most common protein-coding polymorphisms are displayed in FIG. 3 panel A. Relative viral copy number was estimated based on the ratio of HPV16 to human reads observed. Although relative viral copy number had a wide range (>1000 fold), this was not associated with phylogeny, HPV16 sub-lineage, or recurrence-free survival by any threshold examined.

[0123] The maximum parsimony phylogeny of oncogenic oropharyngeal HPV16 viruses could be reasonably divided into two clades, with membership being highly correlated to the number of non-synonymous polymorphisms (as well as total number of SNPs) relative to the HPV16-A1 reference sequence (FIG. 4 panel A). These de-novo clades were also associated with variable recurrence-free survival. Consistent with the sub-lineage analysis, the clade more divergent from (far) HPV16-A1 demonstrated relatively favorable recurrence-free survival (FIG. 4 panel B). This association persisted in a multivariate regression model including viral clade (HR=0.16, 95% CI=0.04-0.61, p-value=0.007), early vs. advanced AJCC8 summary stage (HR=1.6, 95% CI=0.45-5.9, p-value=0.45), and smoking exposure greater than 10 pack-years (HR=1.6, 95% CI=0.61-4.4, p-value=0.33). Viral clade remained associated with RFS on subset analysis excluding patients with extensive (>30 pack-years) tobacco smoke exposure. The association with RFS also persisted when excluding all patients with greater than 10 pack-years of exposure (FIG. 7).Because clinical stage and tobacco exposure history are accepted clinical prognostic markers for HPV+OPSCC, their correlation was directly queried with viral clade, no association was detected (FIG. 4 panels C and D). As was found in the sub-lineage analysis, no difference in antigenicity was identified (FIG. 4 panel E). A subset of tumors (n=37) also had available matched normal DNA sequencing which allowed somatic variant calling (FIG. 8). Mutations in PIK3 (A have been reported as a poor prognosticator but did the frequency of these mutations was similar between the near and far clades (FIG. 8). One TP53 variant was identified in a patient with a low-risk, divergent clade HPV16 genotype. Similar to the above sub-lineage analysis, an increased number of genomic CNV was associated with the near A1 clade (p=0.015). Follow-up time, race, patient age, patient sex, treatment modality, and anatomic site of tumor origin were also examined, stratified according to HPV16 viral clade (Table 2). There was a trend towards more white patients in the near A1, high-risk clade. Follow up time was longer in the divergent (from HPV16-A1) low-risk clade.

Origins of Genomic Diversity in Oncogenic Oropharyngeal HPV16—Environmental Vs. Intra-Tumoral:

[0124] Considering that tumors harboring HPV16 genomes more distantly related to HPV16-A1 had distinct biological characteristics, it was considered whether the origins of the clonal (environmental) HPV genomic diversity of these groups were also distinct. SNPs and their related trinucleotide contexts were generated for identified non-synonymous polymorphisms (in the HPV16 genome). The analysis was limited to those polymorphisms identified in <25% of all tumors investigated (limiting analysis to even more uncommon polymorphisms did not change the qualitative results). Tumors groups were then stratified by viral clade as in FIG. 4, and non-negative matrix factorization for the COSMIC Signatures (V2)⁴⁷ was performed (FIG. 5 panels A and B). Diversity amongst HPV16 genomes more related to HPV16-A1 (FIG. 5 panel A) was dominated by Signature 9 (NMF weight of 0.61) which is thought to be related to DNA Polymerase Eta related mutagenesis. Alternatively, diversity amongst HPV16 genomes more distantly related to HPV16-A1 (FIG. 5 panel B) was dominated by Signature 3 (NMF weight of 0.50) which is thought to be related to defective homologous recombination repair of double-strand breaks. Although the origins of the investigated SNPs are unknown, the trinucleotide context-dependent base substitutions appear to be grossly dissimilar between these two groups of tumors bolstering the concept that they are biologically distinct groups of tumor viruses.

[0125] Sub-clonal viral polymorphisms, which likely arose during or after oncogenesis also demonstrated a distinct pattern of trinucleotide contexts, compared to clonal polymorphisms (FIG. 2 panel E) suggesting a prominent role for APOBEC mediated mutagenesis in defining viral subclones in HNSCC tumor cells. The number of distinct viral subclones were estimated by the Bayesian information criteria (BIC) after clustering of viral sub-clonal VAFs. 31% of tumors had discernable viral genomic sub-clonal populations with an allele fraction >5% (FIG. 5 panel C). Sub-clonal populations were often defined by SNPs (in addition to similar VAFs), had similar trinucleotide contexts, and were close in genomic space, suggestive of multi-mutational kataegis events, which may be the result of APOBEC mediated mutagenesis (FIG. 5 panel D). Neither the frequency of sub-clonal polymorphisms nor sub-clonal populations were associated with patient outcome by any metric investigated.

### Validation of HPV16 Genotyping by RNA Sequencing:

[0126] To determine if RNA sequencing data was sufficient to assign the HPV16 genotype of a given tumor to the viral clades investigated in FIG. 4, 13 patients from the DNA sequencing cohort were also subject to RNA sequencing. Gross agreement of SNPs as determined by DNA and RNA sequencing were seen in all 13 cases. Excluding areas with zero coverage in the RNA data, clade membership was assigned according to the nearest neighbors in sequence space (excluding the parent sample) based on JC69 sequence distance. In 100% (13/13) of cases the viral clade assigned by DNA sequencing was recovered by analysis of the RNA sequencing data. With a single exception, nearest neighbors assigned by RNA were quite close in phylogenetic space to the parent tumor based on DNA (FIG. 6 panel A). Based on prevalence of tumors in the two clade groups, of the probability of 13/13 correct classifications by random chance would be ˜3.8*10\hat{ }-5. Following these data confirming that RNA sequencing correctly classified HPV to near or far clades, further validation studies were performed using tumor with RNA sequencing data alone.

Validation RNA sequencing Cohort:

[0127] Considering the strong relationship of HPV16 viral genotype to recurrence free survival in the cohort presented above, studies were performed to validate the finding in a secondary, independent set of patients. Inclusion criteria were the same as the DNA sequencing cohort, with the exception that p16 status was not examined, because many patients with older archival tissue from OPSCC were not subject to routine p16 testing. 120 patients with archival FFPE from OPSCC were identified and processed for next generation RNA sequencing. Of these, 89 patients were found to express HPV16 genes and had sufficient clinical data for inclusion.

### Validation of HPV16 Genotype by RNA Sequencing as Predictor of RES:

[0128] Prior studies have demonstrated a relationship between viral genomic integration and survival in HPV+OPSCC. To compare the prognostic values of HPV16 genotype and viral integration, integration status was assigned using a combination of human-viral split read pair identification, as well as the ratio of expression of HPV16 genes E6/E7 to E5/E2 (FIG. 6 panel H). A trend towards improved RFSl for HPV16 genotypes divergent from the A1 clade was noted in the RNA-only cohort (FIG. 6 panel B). Patients with high degrees of tobacco smoke exposure were somewhat overrepresented in this new data set, with 20/89 (22%) patients having >=30 pack-years of tobacco smoke exposure. Subset analysis of patients with <30 pack years of tobacco smoke exposure revealed a strong relationship to RFS, with improved survival in patients with more divergent HPV16 sequences (FIG. 6 panel C). This relationship persisted in the subset of patients with <=10 pack-years of smoking exposure (FIG. 6 panel D). Consistent with prior reports, viral integration was prognostic of poor RFS when all patients were examined (FIG. 6 panel E) (Koneva et al. Mol Cancer Res MCR. 2018; 16(1):90-102). However, this association lost significance for patients with less than 30 pack-years or 10 pack-years of smoking exposure (FIG. 6 panels F and G). Within the subset of patients with <=10 pack-years of smoking exposure, HPV16 genotypes closely related to HPV16-A1 were more likely to be integrated (p=0.02, Chi-squared test) (FIG. 6 panel I). No significant differences in AJCC8 stage or tobacco smoke exposure were noted in the <=10 pack-year sub-group, but the far clade (favorable prognosis group) trended toward higher stage and fewer pack years (p=0.09) (FIG. 6 panels J and K).

[0129] In summary, two independent cohorts of HPV16+ OPSCC tumors were analyzed for a total of 187 cases, representing one of the largest reported series of HPV+ OPSCC with viral sequencing. Since HPV16 accounts for greater than 90% of OPSCC, and HPV sub-type may correlate with outcome (Nichols et al. J Otolaryngol—Head Neck Surg. 2013; 42(1):9), we limited our study to HPV16 positive tumors as confirmed by DNA or RNA sequencing. This study has uncovered a surprising degree of genomic diversity in oncogenic HPV16 viral genomes, with 93 distinct protein coding HPV16 genomes amongst the 104 tumors examined. This rich diversity has been previously under investigated in OPSCC.

[0130] HPV+ and HPV-negative OPSCC respond quite differently to treatment, with much better survival for patients with HPV+tumors (Ben-David et al. Nature. 2018; 560(7718):325-330). Excellent rates of 5-year disease control often come at the cost of relatively high rates of unfortunate treatment-related morbidities such as gastrostomy tube dependence and osteoradionecrosis of the mandible. Although there is interest in de-intensification of therapy for HPV+ OPSCC (Cheraghlou et al. Cancer. 2018; 124(4):717-726; Chera et al. Cancer. 2018; 124(11):2347-2354), inaccuracy of current prognostic markers such as smoking history, stage or radiologic characteristics in predicting long-term disease control are of concern to clinicians who fear undertreating a patient who may otherwise be cured with standard regimes (Cheraghlou et al. Cancer. 2018; 124(4):717-726). However, long-term analysis of patients treated with high-intensity chemoradiation protocols has revealed increased non-cancer mortality that may negate the survival advantage of aggressive therapy (Forastiere et al. J Clin Oncol Off J Am Soc Clin Oncol. 2013; 31(7):845-852; Tasoulas et al. Cancer Med. 2021; 10(10):3231-3239).

[0131] This study demonstrates that targeted HPV16 sequencing or total RNA sequencing from FFPE from routine clinical specimens is sufficient to acquire clinically relevant and risk-stratifying information that could inform treatment decisions. The prognostic value of HPV16 genotype classification demonstrated herein within two independent cohorts for the subgroup of patients with no more than 10 pack-years of tobacco smoke exposure (the current eligibility threshold for reduced treatment intensity at our center and others). Although sequencing of the relatively small ˜7900 base HPV genome from FFPE would be easily performed in many modern clinical laboratories, circulating cell-free HPV DNA shed from OPSCC cancer cells can also be detected, quantified and genotyped from clinical blood draw specimens. Therefore, it is also may be possible to similarly acquire prognostic HPV16 genotypic data from clinical blood samples; making HPV16 genotyping a relatively ideal biomarker for clinical application.

[0132] We have previously reported that genomic instability determined by copy number variant burden is also prognostic in HPV16+ OPSCC (Schrank et al. 2021 Cancer 127(15):2788-2800; incorporated herein by reference in its entirety). In the present study it is shown that HPV16-A1 and closely related genotypes are also associated with increased CNV burden. Genomic CNVs identified were primarily numerical chromosomal aberrations or large-scale sub-chromosomal amplifications or losses. This correlation could be explained by the fact that high-risk HPV16 infection and expression of HPV16 E6 and E7 have been demonstrated to directly result in numerical and structural chromosomal instability (Duensing and Münger. Cancer Res. 2002; 62(23):7075-7082).

[0133] Studies have established that HPV infection both induces replication stress, causes DNA damage, disrupts cellular DNA double-strand break (DSB) repair via multiple mechanisms, and that HPV-positive head and neck cancer cells are deficient in homologous recombination repair of double-strand breaks. Double-strand break repair dysfunction has been broadly linked to genomic instability in human cancers. Therefore, it is possible that functional polymorphisms in the HPV16 genome result in differential modulation of the host of human DDR factors known to be influenced by high risk HPV infection. Low-risk HPVs (HPV6, HPV11) have been reported to have relatively diminished ability to disrupt the human DNA damage response (DDR) (Wallace N A. Trends Microbiol. 2020; 28(3):191-201).

[0134] Although somewhat counterintuitive that double-strand break mediated viral mutagenesis was correlated with the low-risk group of tumors (divergent from A1) with relatively stable human genomes (FIG. 5 panel B). This may reflect relatively ineffectual recruitment of human DDR factors to viral replications centers rather than heightened disruption of the DDR in general. Indeed, experimental depletion of host factors involved in the replication of the HPV genome has been demonstrated to primarily decrease the fidelity (increased viral mutagenesis) without greatly altering the throughput of the replicative process. Tumors with HPV16 genomes more similar to the A1 sub-lineage were associated with Polymerase Eta (POLH)-related variants. It is also interesting that E1\hat{ }E4, E2, and to some degree E5—the HPV proteins known to be involved in HPV replication, HPV gene expression, and recently shown to drive alternative episome-based carcinogenesis—were found to be the least conserved amongst HPV16 viral genes (FIG. 2 panels A-B).

[0135] Prior studies of uterine cervical cancer have demonstrated that HPV18 is more likely to integrated as compared to HPV16, suggesting that HPV genotype can influence the likelihood of genomic integration during carcinogenesis (McBride & Warburton. PLOS Pathog. 2017; 13(4): e1006211). In the present work, the RNA sequencing cohort which allowed viral integration analysis, demonstrated a relationship between viral integration and HPV16 genotype in patients with <=10 pack-years of smoking. These data suggest that even more subtle genotypic variations in the HPV genome (amongst HPV16 viruses) may influence the chance of genomic integration. The data herein from two independent patient cohorts suggests that molecular risk-stratification based on HPV16 genotype may be used as a genomic tool for the identification of very low-risk patients which may enable safe treatment de-escalation and limit long-term, treatment-related toxicity which is a key goal in the field.

[0136] DNA sequencing data were collected as a part of the UNCseq tumor sequencing program. The UNCseq targeted sequencing platform involves sequencing exons of a custom list of 650 human genes (covering 3.4 M bases) and 10 pathogen genome segments in fixed or frozen cancer tissue and matched germline DNA from consenting local patients. This custom sequencing platform provided targeted coverage of all HPV16 open reading frames. Tumor sample identifiers and genomic data were derived from the clinical trial LCCC1108: Development of a Tumor Molecular Analyses Program and Its Use to Support Treatment Decisions. This IRB-approved trial opened in 2011. All studies were done with the approval of the Institutional Review Board, patient participation required written informed consent, and all studies were conducted in accordance with recognized ethical guidelines as described in U.S Common Rule. The UNCseq database was queried for all patients with HPV+ oropharyngeal cancer.

[0137] Via chart review of electronic medical records, demographic information was obtained for each study subject, including age, gender, race, and smoking history. Clinical stage at presentation according to the AJCC staging system (AJCC 8^{th} edition) was recorded, clinical AJCC8 staging was used, considering that many patients did not receive surgical treatment. Recurrence-free survival was defined from the date of initial diagnosis to the date at which evidence of recurrent disease was first documented after primary treatment. Cases that presented with distant metastasis (n=2) were excluded from recurrence free survival analysis. All survival analysis was performed with the R Survival package. Cox proportional hazards models were implemented with the coxph function.

### DNA Isolation, Library Preparation, and Sequencing:

[0138] A pathologist examined H&E-stained slides from each case to confirm the diagnosis of squamous cell carcinoma. Automated DNA extraction was from FFPE tissue sections using the Promega Maxwell MD×16™ instruments (Promega) and then fragmented by sonication. Subsequent quality assessments were performed by ultraviolet absorbance and quantity assessments. During

[0139] DNA isolation and library preparation, DNA concentration was measured by fluorometry and DNA quality was evaluated using the Agilent 2100 Bioanalyzer high sensitivity assay. DNA libraries were pooled for deep sequencing using an Illumina HiSeq2500™ sequencer. Excluding the hypervariable region 3150-3351, median coverage of the HPV16 genome was 7904 with an IQR of 6867-7953. The hypervariable region 3150-3351 had median coverage of 3307 with an IQR of 837-7377. Data have been made publicly available through dbGaP accession number phs001713.v1.p1.

### RNA Isolation, Library Preparation, and Sequencing:

[0140] Formalin-fixed paraffin-embedded (FFPE) tissue samples were prepared for RNA isolation using the Maxwell 16 MDx Instrument (Promega AS3000) and the Maxwell 16 LEV RNA FFPE Kit (Promega AS1260) following the manufacturer's protocol (Promega 9FB167). After a pathology review of a hematoxylin and eosin (H&E) stained slide to identify tumor area, RNA was extracted from unstained slides using macrodissection. Total RNA quality was measured using a NanoDrop spectrophotometer (Thermo Scientific ND-2000C) and a TapeStation 4200 (Agilent G2991AA). Total RNA concentration was quantified using a Qubit 3.0 fluorometer (Life Technologies Q33216). Libraries were prepared with Illumina TruSeq Stranded Total RNA with Ribo-Zero protocol. Libraries were sequenced on an Illumina HiSeq2500 sequencer. Paired end read data, with read lengths of 75 were collected.

### Bioinformatics:

[0141] Raw reads were aligned to the human genome plus a comprehensive library of HPV virus sequences, using compiled reference sequences from the ViFi analysis pipeline. Human genomic mutations were not investigated as only a subset of samples had matched normal DNA sequencing. Tumors were considered to be HPV16 positive if they had more than 20,000 reads mapping to the HPV16 genome. The HPV16 A1 genotype, RefSeq NC_001526.4 (incorporated herein by reference in its entirety) was selected as the primary reference sequence for this study. The Varscan pipeline was used for variant/polymorphism calling, using the reference-free approach. The SnpEff pipeline was used to assign and prioritize variant effects. Consensus sequences were derived from the variant calls which represented clonal variants using in-house scrips. SNPs were only analyzed if the sequencing depth was >=100 and VAF >=0.5. Variants were considered subclonal if VAF <=0.9. The HPV tumor genomes were then aligned against each other and 16 reference HPV16 sub-lineage sequences. Alignments were imported into R for phylogenetic analyses, where maximum parsimony phylogeny was constructed using default parameters provided in the phangorn package. To assign the nearest sub-lineages to the tumor HPV genomes, the R phangorn package was used to construct a sequence distance matrix for each tumor HPV and 16 reference sequences. Each tumor sample was assigned to an HPV16 sub-lineage based on the “closest” reference sequence using the “JC69” distance.

### Neo-Antigenicity Analysis—

[0142] For each patient, targeted genomic sequencing including HLA-A, HLA-B, HLA-C was processed by the Optitype pipeline. Comparison with matched normal (blood) sequencing data, where available, demonstrated remarkable consistency of the results between tumor and matched normal blood. Therefore, tumor sequencing data was utilized for HLA typing for the purposes of this study. The netMHCpan pipeline was then applied to generate predicted binding affinities of all possible patient-matched viral peptide and MHC pairs. An empiric threshold of <325 nM was applied to identify high affinity interaction between MHC and viral peptides. The log fraction of high-affinity to all possible viral peptide MCH interactions was also investigated as a neo-antigenicity metric, as homozygous haplotypes of HLA loci in some patients made the background number of potential peptide-HLA interactions variable between patients.

### APOBEC and Mutational Signature Analysis—

[0143] Based on prior reports, mutational contexts represented by COSMIC Version 2 Signature 13 (C>G variants) and Signature 2 (C>T variants) were considered to be potentially APOBEC related (Revathidevi et al. Cancer Lett. 2021; 496:104-116). Using the trinucleotide contexts most prominent in COSMIC Signatures 2 (T [C>T] A, T [C>T] C, T [C>T] T) and 13 (T [C>G] A, T [C>G] C, T [C>G] T), alterations were counted as potentially APOBEC related. Chi-squared test was applied to determine differences in minor proportions of ABOBEC related variants. Nonnegative matrix factorization was used to estimate the contribution of different mutational process influencing the HPV16 genome. This analysis was implemented and visualized with the R package DeconstructSigs, after generating trinucleotide context SNP matrices with in-house scripts.

### Somatic Variant Calling—

[0144] Sequencing data were routed through an automated pipeline including a somatic workflow using paired tumor and normal libraries to detect somatic mutations, large and small indels, structural variants, and pathogenic organisms. Raw sequences were aligned using the BWA-mem algorithm and refined using an assembly based realignment process to allow for accurate alignment of complex sequence variation. Only high confidence variants with phred-scaled quality scores greater than 30 were included in the analysis. Average target coverage was ˜1000x.

### Copy Number Variant Calling—

[0145] Copy number calls were generated with the SynthEx algorithm using the tumor sequencing data and a library of 200 un-matched normal samples sequenced with the same technique. The SynthEx pipeline utilizes both on and off target reads to allow large-segment copy number variant calling across the human genome. A conservative approach was taken. Thirty replicates varying the parameter k (number of nearest neighbor) were done per tumor and the model with the fewest deviations from the expected copy number of 2 was selected. Sex chromosomes were excluded.

### RNA Data Quantification—

[0146] The HPV16 A1 genotype, RefSeq NC_001526.4 was selected as the primary reference sequence for this study. Salmon was used to quantify RNA reads for NC_001526.4 as well as hg38 (Patro et al. Nat Methods. 2017; 14(4):417-419). Viral transcripts read counts were transformed into log 2 viral read counts per million total mapped reads (human and viral) prior to visualization and analysis. Tumors were considered to be HPV16 positive if there were more than 2000 reads mapping to HPV16 and the log 10 ratio of HPV16/Human reads was >−4.5. 24 cases were excluded based on these criteria.

### Viral Integration Analysis—

[0147] The ViFi pipeline was used to identified discordant (human—viral) read pairs which cluster to potential integration sites in the human and HPV genomes. Tumors with more than 25 clustered discordant read pairs were classified as positive for (discordant) split reads. The ratio HPV16 E6 and E7 to HPV16 E5 and E2 was calculated for each tumor based on quantification from Salmon. Above a ratio of −0.304, 88% of tumors also displayed locus specific clusters of human-viral split read pairs. Below this threshold only 26% of tumors had human-viral split read pairs. Therefore, tumors with E6E7/E5E2 ratio above this threshold were considered to have an integrated pattern of viral gene expression.

### Viral Genotyping by RNA—

[0148] First partial consensus sequences were constructed from viral BAM files output from the ViFi pipeline. With the goal getting an approximate sequence, the Varscan pipeline was used for variant/polymorphism calling, using the reference-free approach, and lax parameters with minimal coverage requirement of 1, VAF minimum of 0.51 and no p-value cut off. These “variants” were used to construct approximate consensus sequences in area of the viral genome covered by the sequencing data. See Supplemental FIG. 3, for an illustration of the gross quality of HPV16 genotype data as ascertained by RNAseq. JC69 sequence distances from these partial, approximate viral sequences were then calculated using the R phangorn package. Tumors were classified into viral clades based on the majority voting of the three nearest neighbors from the DNA sequencing cohort. For the 13 tumors with both DNA and RNA sequencing, this method recovered the viral clade in 100% of cases (FIG. 6 panel A).

### Inclusion Criteria:

[0149] The UNCseq database was queried for p16+ tumors originating from the anatomic oropharynx (tonsil or tongue base) with available tumor sequencing data as well as data on stage, treatment strategy, clinical outcome, and histopathology available. HPV16 positivity was confirmed by DNA sequencing reads which mapped to the HPV16 genome. For the DNA sequencing cohort, patients were excluded from clinical analyses if tumors were not p16+ or were from atypical oropharyngeal sub-sites (midline soft palate or lateral oropharyngeal wall) (FIG. 1). The confirmatory RNA sequencing cohort included cases dating prior to routine p16 IHC was performed at our institution, therefore, p16 status was not considered in this secondary cohort.

### Example 2: HPV16-A1 Genotype is Associated with Poor Recurrence-Free Survival in HPV16-Associated Squamous Cell Carcinoma of the Oropharynx

[0150] HPV-positive squamous cell carcinoma of the oropharynx (HPV+ OPSCC) is the most prevalent HPV-associated malignancy in the United States and is primarily caused by HPV16. Favorable treatment outcomes have led to increasing interest in treatment de-escalation to reduce treatment-related morbidity. Prognostic biomarkers are needed to identify appropriately low-risk patients for reduced treatment intensity. Large series of complete HPV16 genome sequencing from HPV+ OPSCC tumors are lacking in the literature. Therefore, this study tested the hypothesis that HPV16 genotype is prognostic of recurrence-free survival (RFS) in HPV16+ OPSCC.

[0151] Materials/Methods: Targeted sequencing of 104 patients with HPV16+ OPSCC tumors was performed, providing complete coverage of all HPV16 open reading frames. Clinical features were retrospectively extracted from the medical record. A second cohort of OPSCC patients was sequenced using total RNA sequencing, which identified 89 patients with HPV16+ OPSCC for analysis.

[0152] Results: A high degree of coding diversity in the HPV16 was identified, with 93 distinct protein-coding HPV16 genotypes amongst the 104 patients subject to HPV (DNA) sequencing. As found in uterine cervical carcinoma, E7 was the most conserved amongst HPV16 viral genes. Sub-clonal variants were more likely to be non-synonymous and were enhanced for APOBEC-related mutagenesis. The HPV16-A1 sub-lineage was the most prevalent (approximately 70%). Genotypes closely related to HPV16-A1 were associated with increased numbers of copy-number variants in the human genome. Genotypes divergent from HPV16-A1 were strongly associated with favorable RFS as compared to HPV16-A1 (or similar genotypes); this finding was independent of tobacco smoke exposure. HPV16 genotypes divergent from HPV16-A1 were subsequently validated in an independent cohort (subject to RNA sequencing), to be associated with improved RFS in patients with moderate (less than 30 pack-years) and low (no more than 10 pack-years) of tobacco smoke exposure.

[0153] Conclusion: HPV16 viral genotype is highly diverse in HPV associated OPSCC. Sequence divergence from the HPV16-A1 reference sequence is strongly associated with improved RFS in patients with moderate to no tobacco smoke exposure. This finding was confirmed in two independent cohorts. HPV16 genotype is a promising biomarker to guide therapeutic decision-making related to de-escalation therapy. Prognostic genotypic information can be obtained from clinical samples stored in FFPE applying either DNA or RNA sequencing technology.

### Tables

TABLE 1
Clinical Features Stratified by HPV16 Sub-lineage: DNA Sequencing
Cohort. P-values - represent Chi-squared test applied to categorical
data and t-test for continuous numerical data.

| | HPV16-A1 | HPV16-Other | |
|---|---|---|---|
| | n = 70 | n = 28 | p-value |
| Age (mean(SD)) | 57.90 (9.70) | 58.39 (10.28) | 0.824 |
| Sex (% Female) | 12 (17.1) | 2 (7.1) | 0.338 |
| Race (% White) | 66 (94.3) | 22 (78.6) | 0.051 |
| AJCC8 Stage | | | 0.785 |
| I | 42 (60.0) | 18 (64.3) | |
| II | 18 (25.7) | 5 (17.9) | |
| III | 9 (12.9) | 4 (14.3) | |
| IV | 1 (1.4) | 1 (3.6) | |
| Smoking pack-years | 11.32 (18.87) | 11.26 (20.83) | 0.989 |
| (mean(SD)) | | | |
| Follow-up-time in days | 1247.01 (493.20) | 1489.57 (697.29) | 0.055 |
| (mean(SD)) | | | |
| Treatment Strategy (%) | | | 0.742 |
| chemoradiation | 52 (74.3) | 17 (60.7) | |
| palliative chemo | 1 (1.4) | 1 (3.6) | |
| radiation | 2 (2.9) | 1 (3.6) | |
| surgery alone | 3 (4.3) | 2 (7.1) | |
| surgery with adjuvant | 12 (17.1) | 7 (25.0) | |
| Anatomic Subsite | 38 (54.3) | 18 (64.3) | 0.498 |
| (% Tonsil) | | | |

TABLE 2
Clinical Features Stratified by HPV16 Viral Clade: DNA Sequencing Cohort.
Clades as assigned in FIG. 4. P-values - represent Chi-squared test
applied to categorical data and t-test for continuous numerical data.

| | Near HPV16-A1 | Divergent from A1 | |
|---|---|---|---|
| | n = 56 | n = 42 | p-value |
| Age (mean(SD)) | 58.41 (9.77) | 57.55 (9.99) | 0.669 |
| Sex (% Female) | 9 (16.1) | 5 (11.9) | 0.771 |
| Race (% White) | 53 (94.6) | 35 (83.3) | 0.135 |
| AJCC8 Stage | | | 0.987 |
| I | 35 (62.5) | 25 (59.5) | |
| II | 13 (23.2) | 10 (23.8) | |
| III | 7 (12.5) | 6 (14.3) | |
| IV | 1 (1.8) | 1 (2.4) | |
| Smoking pack-years | 11.38 (18.80) | 11.20 (20.27) | 0.964 |
| (mean(SD)) | | | |
| Follow-up-time in days | 1208.50 (474.81) | 1460.07 (647.13) | 0.029 |
| (mean(SD)) | | | |
| Treatment Strategy (%) | | | 0.901 |
| chemoradiation | 41 (73.2) | 28 (66.7) | |
| palliative chemo | 1 (1.8) | 1 (2.4) | |
| radiation | 2 (3.6) | 1 (2.4) | |
| surgery alone | 3 (5.4) | 2 (4.8) | |
| surgery with adjuvant | 9 (16.1) | 10 (23.8) | |
| Anatomic Subsite | 30 (53.6) | 26 (61.9) | 0.536 |
| (% Tonsil) | | | |

TABLE 3
Clinical Features Stratified by HPV16 Viral Clade: RNA Sequencing Validation
Cohort. Clades as assigned in FIG. 6 panel A. P-values - represent Chi-squared
test applied to categorical data and t-test for continuous numerical data.

| | Near HPV16-A1 | Divergent from A1 | |
|---|---|---|---|
| | n = 49 | n = 40 | p-value |
| Age (mean(SD)) | 56.56 (8.98) | 56.17 (7.78) | 0.83 |
| Sex (% Female) | 5 (10.2) | 1 (2.5) | 0.31 |
| Race (% White) | 46 (93.9) | 36 (90.0) | 0.779 |
| AJCC8 Stage | | | 0.025 |
| I | 27 (56.2) | 15 (37.5) | |
| II | 14 (29.2) | 9 (22.5) | |
| III | 7 (14.6) | 16 (40.0) | |
| IV | 0 (0) | 0 (0) | |
| Smoking pack-years | 15.57 (18.22) | 15.00 (19.34) | 0.886 |
| (mean(SD)) | | | |
| Follow-up-time in days | 2692.29 (1703.43) | 2624.00 (1762.68) | 0.853 |
| (mean(SD)) | | | |
| Treatment Strategy (%) | | | 0.73 |
| chemoradiation | 45 (91.8) | 36 (90.0) | |
| palliative chemo | 0 (0) | 0 (0) | |
| radiation | 2 (4.1) | 1 (2.5) | |
| surgery alone | 0 (0) | 0 (0) | |
| surgery with adjuvant | 2 (4.1) | 3 (7.5) | |
| Anatomic Subsite | 29 (59.2) | 17 (42.5) | 0.31 |
| (% Tonsil) | | | |

### Sequences

[0154] The following samples (determined by phylogenetic analysis) are defined as low risk/de-escalation group:

[0155] “UNCseq1628” SEQ ID NO: 13, “UNCseq1770” SEQ ID NO:23, “UNCseq2162” SEQ ID NO: 58, “UNCseq1750” SEQ ID NO:22, “UNCseq1864” SEQ ID NO:30, “UNCseq1867” SEQ ID NO:31, “UNCseq2234” SEQ ID NO:62, “UNCseq2491” SEQ ID NO: 80, “UNCseq2539” SEQ ID NO:82, “UNCseq2012” SEQ ID NO:48, “UNCseq2554” SEQ ID NO:83, “UNCseq2771” SEQ ID NO:93, “UNCseq1796” SEQ ID NO:25, “UNCseq0733” SEQ ID NO: 1, “UNCseq2051” SEQ ID NO:52, “UNCseq2789” SEQ ID NO: 102, “UNCseq2106” SEQ ID NO:56, “UNCseq1742” SEQ ID NO:20, “UNCseq1140” SEQ ID NO:4, “UNCseq1849” SEQ ID NO:28, “UNCseq 1980” SEQ ID NO:41, “UNCseq2005” SEQ ID NO:45, “UNCseq2105” SEQ ID NO:55, “UNCseq1360” SEQ ID NO: 6, “UNCseq1525” SEQ ID NO:7, “UNCseq1891” SEQ ID NO:32, “UNCseq 1662” SEQ ID NO: 14, “UNCseq 1924” SEQ ID NO:36, “UNCseq2292” SEQ ID NO:66, “UNCseq1994” SEQ ID NO:43, “UNCseq2007” SEQ ID NO:46, “UNCseq1834” SEQ ID NO:26, “UNCseq2783” SEQ ID NO: 100, “UNCseq2786” SEQ ID NO: 101, “UNCseq1693” SEQ ID NO: 66, “UNCseq2033” SEQ ID NO:51, “UNCseq0848” SEQ ID NO:2, “UNCseq2249” SEQ ID NO: 63, “UNCseq2794” SEQ ID NO: 106, “UNCseq2393” SEQ ID NO:72, “UNCseq2576” SEQ ID NO:84, “UNCseq2795” SEQ ID NO: 107, “UNCseq1697” SEQ ID NO: 17, “UNCseq1938” SEQ ID NO:38, “UNCseq1991” SEQ ID NO:42

[0156] Samples recited below which are not named above are defined as high risk/do not de-escalate.

[0157] UNCseq0733 (SEQ ID NO:1); UNCseq0848 (SEQ ID NO:2); UNCseq1009 (SEQ ID NO:3); UNCseq1140 (SEQ ID NO:4); UNCseq1310 (SEQ ID NO:5); UNCseq1360 (SEQ ID NO:6) UNCseq1525 (SEQ ID NO:7); UNCseq1527 (SEQ ID NO:8); UNCseq1583 (SEQ ID NO:9); UNCseq 1588 (SEQ ID NO:10); UNCseq1593 (SEQ ID NO:11); UNCseq1610 (SEQ ID NO: 12); UNCseq1628 (SEQ ID NO:13); UNCseq1662 (SEQ ID NO:14); UNCseq1678 (SEQ ID NO:15); UNCseq1693 (SEQ ID NO:16); UNCseq1697 (SEQ ID NO:17); UNCseq1710 (SEQ ID NO:18); UNCseq1712 (SEQ ID NO:19); UNCseq 1742 (SEQ ID NO: 20); UNCseq1743 (SEQ ID NO:21); UNCseq1750 (SEQ ID NO:22); UNCseq1770 (SEQ ID NO:23); UNCseq1787 (SEQ ID NO:24); UNCseq1796 (SEQ ID NO:25); UNCseq1834 (SEQ ID NO:26); UNCseq1840 (SEQ ID NO:27); UNCseq1849 (SEQ ID NO: 28); UNCseq1851 (SEQ ID NO:29); UNCseq1864 (SEQ ID NO:30); UNCseq1867 (SEQ ID NO:31); UNCseq1891 (SEQ ID NO:32); UNCseq1897 (SEQ ID NO:33); UNCseq1906 (SEQ ID NO:34); UNCseq1918 (SEQ ID NO:35); UNCseq1924 (SEQ ID NO: 36); UNCseq1930 (SEQ ID NO:37); UNCseq1938 (SEQ ID NO:38); UNCseq1954 (SEQ ID NO:39); UNCseq1958 (SEQ ID NO:40); UNCseq1980 (SEQ ID NO:41); UNCseq1991 (SEQ ID NO:42); UNCseq1994 (SEQ ID NO:43); UNCseq2000 (SEQ ID NO: 44); UNCseq2005 (SEQ ID NO:45); UNCseq2007 (SEQ ID NO:46); UNCseq2010 (SEQ ID NO:47); UNCseq2012 (SEQ ID NO:48); UNCseq2025 (SEQ ID NO:49); UNCseq2032 (SEQ ID NO:50); UNCseq2033 (SEQ ID NO:51); UNCseq2051 (SEQ ID NO: 52); UNCseq2056 (SEQ ID NO:53); UNCseq2083 (SEQ ID NO:54); UNCseq2105 (SEQ ID NO:55); UNCseq2106 (SEQ ID NO:56); UNCseq2116 (SEQ ID NO:57); UNCseq2162 (SEQ ID NO:58); UNCseq2166 (SEQ ID NO:59); UNCseq2182 (SEQ ID NO: 60); UNCseq2209 (SEQ ID NO:61); UNCseq2234 (SEQ ID NO:62); UNCseq2249 (SEQ ID NO:63); UNCseq2253 (SEQ ID NO:64); UNCseq2254 (SEQ ID NO:65); UNCseq2292 (SEQ ID NO:66); UNCseq2298 (SEQ ID NO:67); UNCseq2333 (SEQ ID NO: 68); UNCseq2337 (SEQ ID NO:69); UNCseq2344 (SEQ ID NO:70); UNCseq2376 (SEQ ID NO:71); UNCseq2393 (SEQ ID NO:72); UNCseq2413 (SEQ ID NO:73); UNCseq2426 (SEQ ID NO:74); UNCseq2427 (SEQ ID NO:75); UNCseq2430 (SEQ ID NO: 76); UNCseq2450 (SEQ ID NO:77); UNCseq2468 (SEQ ID NO:78); UNCseq2476 (SEQ ID NO:79); UNCseq2491 (SEQ ID NO:80); UNCseq2523 (SEQ ID NO:81); UNCseq2539 (SEQ ID NO:82); UNCseq2554 (SEQ ID NO:83); UNCseq2576 (SEQ ID NO: 84); UNCseq2594 (SEQ ID NO:85); UNCseq2601 (SEQ ID NO:86); UNCseq2708 (SEQ ID NO:87); UNCseq2750 (SEQ ID NO:88); UNCseq2767 (SEQ ID NO:89); UNCseq2768 (SEQ ID NO:90); UNCseq2769 (SEQ ID NO:91); UNCseq2770 (SEQ ID NO: 92); UNCseq2771 (SEQ ID NO:93); UNCseq2772 (SEQ ID NO:94); UNCseq2773 (SEQ ID NO:95); UNCseq2774 (SEQ ID NO:96); UNCseq2775 (SEQ ID NO:97); UNCseq2778 (SEQ ID NO:98); UNCseq2779 (SEQ ID NO:99); UNCseq2783 (SEQ ID NO: 100); UNCseq2786 (SEQ ID NO:101); UNCseq2789 (SEQ ID NO:102); UNCseq2790 (SEQ ID NO:103); UNCseq2791 (SEQ ID NO:104); UNCseq2792 (SEQ ID NO:105); UNCseq2794 (SEQ ID NO:106); UNCseq2795 (SEQ ID NO:107)

[0158] Sample HPV16 sub-lineage genotypes.

[0159] A1 (SEQ ID NO:108); A2 (SEQ ID NO: 109); A3 (SEQ ID NO:123); A4 (SEQ ID NO:110); B1 (SEQ ID NO:111); B2 (SEQ ID NO:112); B3 (SEQ ID NO:113); B4 (SEQ ID NO:114); C1 (SEQ ID NO:115); C2 (SEQ ID NO:116); C3 (SEQ ID NO:117); C4 (SEQ ID NO:118); DI (SEQ ID NO:119); D2 (SEQ ID NO:120); D3 (SEQ ID NO:121); D4 (SEQ ID NO:122)

[0160] The foregoing is illustrative of the present invention, and is not to be construed as limiting thereof. The invention is defined by the following claims, with equivalents of the claims to be included therein.

1. A method of determining a treatment regimen for a subject having human papillomavirus (HPV) positive (HPV+) throat cancer and/or cervical cancer or a subject at risk for or suspected to have or develop HPV+ cancer and treating said subject with de-escalated treatment to the cancer, comprising:
a) obtaining a sample from the subject;
b) detecting a level of expression of HPV virus genome and/or genome product in the sample;
c) obtaining sequence information of the HPV viral genome and/or genome product in the sample;
d) comparing the sequence information obtained in c) to a reference HPV viral genome;
e) determining the prognosis of the subject upon treatment to the cancer, wherein a low divergence of the sequence information of the detected HPV virus genome and/or genome product as compared to the reference HPV viral genome identifies the subject as a candidate for standard treatment for the cancer, and wherein a greater divergence identifies the subject as a suitable candidate for de-escalated treatment for the cancer; and
f) treating the subject identified as a suitable candidate for de-escalated treatment, with de-escalated treatment to the cancer.

2-4. (canceled)

5. A method of de-escalating treatment of human papillomavirus (HPV) positive cancer in a subject having human papillomavirus (HPV) positive (HPV+) throat cancer and/or cervical cancer or a subject at risk for or suspected to have or develop HPV+ throat cancer and/or cervical cancer and undergoing standard treatment of the cancer, comprising:
a) obtaining a sample from the subject;
b) detecting a level of expression of HPV virus genome and/or genome product in the sample;
c) obtaining sequence information of the HPV viral genome and/or genome product in the sample;
d) comparing the sequence information obtained in c) to a reference HPV viral genome;
e) identifying the risk of poor prognosis of the subject from de-escalated treatment to the cancer, wherein a low divergence of the sequence information of the detected HPV virus genome and/or genome product as compared to the reference HPV viral genome categorizes the subject as having elevated risk of poor prognosis from de-escalated treatment to the cancer, and wherein a greater divergence identifies the subject as a candidate for de-escalated categorizes the subject as having reduced risk of poor prognosis from de-escalated treatment to the cancer; and
f) treating the subject identified as having reduced risk of poor prognosis from de-escalated treatment with de-escalated treatment as compared to standard treatment for the cancer.

6. A method of treating human papillomavirus (HPV) positive (HPV+) cancer in a subject having human papillomavirus (HPV) positive (HPV+) throat cancer and/or cervical cancer or a subject at risk for or suspected to have or develop HPV+ throat cancer and/or cervical cancer, comprising:
a) obtaining a sample from the subject;
b) detecting a level of expression of HPV virus genome and/or genome product in the sample;
c) obtaining sequence information of the HPV viral genome and/or genome product in the sample;
d) comparing the sequence information obtained in c) to a reference HPV viral genome;
e) identifying the risk of poor prognosis of the subject from de-escalated treatment to the cancer, wherein a low divergence of the sequence information of the detected HPV virus genome and/or genome product as compared to the reference HPV viral genome categorizes the subject as having elevated risk of poor prognosis from de-escalated treatment to the cancer, and wherein a greater divergence categorizes the subject as having reduced risk of poor prognosis from de-escalated treatment to the cancer; and
f) treating the subject identified as having reduced risk of poor prognosis from de-escalated treatment with de-escalated treatment as compared to standard treatment for the cancer.

7. The method of claim 6, wherein obtaining sequence information of the HPV viral genome and/or genome product in the sample comprises obtaining RNA and/or DNA sequence information.

8. The method of claim 6, wherein the comparing comprises one or more of the following comparisons:
a) identifying one or more polymorphism(s) of the detected HPV virus genome and/or genome product and comparing the identified one or more polymorphism(s) to polymorphisms of the reference HPV viral genome, wherein a divergence of 17 or fewer polymorphisms of the detected HPV virus genome and/or genome product as compared to the reference HPV viral genome categorizes the subject as having elevated risk of poor prognosis from de-escalated treatment to the cancer, and wherein a divergence of 18 or more polymorphisms (e.g., non synonymous polymorphisms) to the reference HPV viral genome categorizes the subject as having reduced risk of poor prognosis from de-escalated treatment to the cancer;
b) determining a nearest neighbor distribution of the detected HPV virus genome and/or genome product as compared to the reference HPV viral genome, wherein a nearest neighbor distribution of the sequence information of the detected HPV virus genome and/or genome product less than a predetermined threshold as compared to the reference HPV viral genome categorizes the subject as having elevated risk of poor prognosis from de-escalated treatment to the cancer, and wherein a nearest neighbor distribution equal to or greater than the pre-determined threshold as compared to the reference HPV viral genome categorizes the subject as having reduced risk of poor prognosis from de-escalated treatment to the cancer; and/or
c) calculating a sequence distance of the sequence information of the detected HPV virus genome and/or genome product as compared to the reference HPV viral genome, wherein a sequence distance equal to or less than a pre-determined threshold of the detected HPV virus genome and/or genome product as compared to the reference HPV viral genome categorizes the subject as having elevated risk of poor prognosis from de-escalated treatment to the cancer, and wherein a sequence distance greater than the pre-determined threshold of the detected HPV virus genome and/or genome product as compared to the reference HPV viral genome categorizes the subject as having reduced risk of poor prognosis from de-escalated treatment to the cancer.

9. The method of claim 8, wherein the pre-determined threshold for the nearest neighbor distribution and/or the sequence distance is determined by a phylogenetic analysis of the reference HPV viral genome, wherein the HPV viral genome is a reference library comprising a multitude of reference HPV viral genomes.

10. The method of claim 9, wherein the phylogenetic analysis establishes at least two or more groups, wherein at least one group includes a HPV A1 reference genome, and wherein at least one group is devoid of a HPV A1 reference genome.

11. The method of claim 10, wherein the high risk group is defined as inclusive of any viral genome with a divergence of 17 or fewer polymorphisms as compared to the reference HPV viral genome.

12. The method of claim 10, wherein the high risk group is defined as inclusive of any viral genome with a divergence of 8 or fewer non-synonymous polymorphisms as compared to the reference HPV viral genome.

13. (canceled)

14. The method of claim 8, wherein the one or more polymorphism(s) comprise all polymorphisms, single nucleotide polymorphisms (SNPs), non-synonymous polymorphisms, synonymous polymorphisms, or any combination thereof.

15-16. (canceled)

17. The method of claim 8, wherein identifying one or more polymorphism(s) of the detected HPV virus genome and/or genome product and comparing the identified polymorphisms to polymorphisms of the reference HPV viral genome comprises identifying the presence of one or more E5 I44L, E5 I65V, E2 P219S, L1 T266A, L2 L330F, E6 L90V, E1 S220T, L2 S269P, E2 T310K, E2 I210T, L1 T353P, E2 E232K, E2 A143T, L2 I420T, or E2 N203D polymorphisms or any other polymorphism disclosed herein in the detected HPV virus genome and/or genome product and comparing the identified polymorphisms to the presence of E5 I44L, E5 I65V, E2 P219S, L1 T266A, L2 L330F, E6 L90V, E1 S220T, L2 S269P, E2 T310K, E2 I210T, L1 T353P, E2 E232K, E2 A143T, L2 I420T, or E2 N203D polymorphisms or any other polymorphism disclosed herein in the reference HPV viral genome, wherein a divergence of less than about 8 polymorphisms of the detected HPV virus genome and/or genome product as compared to the reference HPV viral genome categorizes the subject as having elevated risk of poor prognosis from de-escalated treatment to the cancer, and wherein a divergence of greater than about 8 polymorphisms to the reference HPV viral genome categorizes the subject as having reduced risk of poor prognosis from de-escalated treatment to the cancer.

18. The method of claim 6, wherein de-escalated treatment to cancer comprises treating the subject with no and/or a reduced amount of one or more treatments of radiation therapy, chemotherapy, immunotherapy, surgery, and/or intubation of the subject.

19-21. (canceled)

22. The method of claim 6, wherein the subject is receiving and/or has previously received standard treatment for the cancer.

23. The method of claim 6, wherein the subject is not receiving and/or has not previously received standard treatment for the cancer.

24. The method of claim 23, wherein the subject is newly diagnosed has having the cancer.

25. The method of claim 6, wherein the HPV virus genome and/or genome product in the sample comprises a strain of HPV16.

26. The method of claim 6, wherein the reference HPV viral genome comprises a “high risk” HPV viral genome.

27. The method of claim 6, wherein the reference HPV viral genome comprises one or more reference HPV viral genomes.

28. The method of claim 6, wherein the reference HPV viral genome is a reference library comprising the viral genome(s) of HPV strain GenBank® Accession No. NC_001526.4 (HPV16 A1, also numerated as K02718.1), AF536179.1 (HPV16 A2), HQ644236.1 (HPV16 A3), AF534061.1 (HPV16 A4), AF536180.1 (HPV16 B1), KU053915.1 (HPV16 B2), HQ644298.1 (HPV16 B3), KU053914.1 (HPV16 B4), AF472509.1 (HPV16 C1), HQ644244.1 (HPV16 C2), KU053920.1 (HPV16 C3), KU053925.1 (HPV16 C4), HQ644257.1 (HPV16 D1), AY686579.1 (HPV16 D2), AF402678.1 (HPV16 D3), KU053931.1 (HPV16 D4), and/or any combination thereof.

29-31. (canceled)

32. The method of claim 6, wherein the cancer is HPV+ oropharyngeal squamous cell carcinoma (OPSCC).

The application's sequence listing, which the Patent Office published only in electronic form, follows.

SEQUENCE LISTING (123 sequences)

SEQ ID NO: 1 - DNA, 7906 bp, Homo sapiens
  source 1..7906: mol_type = genomic DNA; note = UNCseq0733
atggctgatcctgcaggtaccaatggggaagagggtacgggatgtaatggatggttttatgtagaggctgtagtggaaaaaaaaacaggggatgctatatcagatgacgagaacgaaaatgacagtgatacaggtgaagatttggtagattttatagtaaatgataatgattatttgacacaggcagaaacagagacagcacatgcgttgtttactgcacaggaagcaaaagaacatagagatgcagtacaggttctaaaacgaaagtatttgggtagtccacttagtgatattagtgaatgtgtagacaataatattagtcctagattaaaagccatatgtatagaaaaacaaagtagagctgcaaaaaggagattatttgaaagcgaagacagcgggtatggcaatactgaagtggaaactcagcagatgttacaggtagaagggcgccatgagactgaaacaccatgtagtcagtatagtggtggaagtgggggtggtagcagtcagtatagtagtggaagtgggggagagggtgttagtgaaagacacactatatgcgaaacaccacttacaaatattttaaatgtactaaaaactagtaatgcaaaggcagcaatgctagcaaaatttaaagagttatacggggtgagttttacagaattagtaagaccatttaaaagtaataaatcaacgtgttgcgattggtgtattgctgcatttggacttacacccagtatagctgacagtataaaaacattattacaacaatattgtttatatttacacattcaaagtttagcgtgttcatggggaatggttgtgttactattagtaagatataaatgtggaaaaaatagagaaacaattgaaaaattgatgtctaaactattatgtgtgtctccaatgtgtatgatgatagagcctccaaaattgcgtagtacagcagcagcattatattggtataaaacaggtatgtcaaatattagtgaagtgtatggagacacgccagaatggatacaaagacaaacagtattacaacatagttttaatgattgtacatttgaattatcacagatggtacaatgggcctacgataatgacatagtagacgatagtgaaattgcatataaatatgcacaattggcagacactaatagtaatgcaagtgcctttttaaaaagtaattcacaggcaaaaattgtaaaggattgtgcaacaatgtgtagacattataaacgagcagaaaaaaaacaaatgagtatgagtcaatggataaaatatagatgtgatagggtagatgatggaggtgattggaagcaaattgttatgtttttaaggtatcaaggtgtagactttatgtcatttttaagtgcattaaaaaaatttctgcaaggtatacctaaaaaaaattgcatattattatatggtgcagctaacacaggtaaatcattatttggtatgagtttaatgaaattcttgcaagggtctgtaatatgttttgtaaattctaaaagccatttttggttacaaccattagcagatgccaaaataggtatgttagatgatgctacagtgccctgttggaactacatagatgacaatttaagaaatgcattggatggaaatttagtttctatggatgtaaagcatagaccattggtacaactaaaatgccctccattattaattacatctaacattaatgctggtacagattccaggtggccttatttacataatcgattggtggtgtttacatttccaaatgagtttccatttgacaaaaacggaaatccagtgtatgagcttaatgataagaactggaaatcctttttctcaaggacgtggtccagattaagtttgcacgaggacgaggacaaggaaaacgatggagactctttgccaacgtttaaatgtgtgtcaggacaaaatactaacacattatgaaaatgatagtacagacctacgtgaccatatagactattggaaacaaatgcgcctagaatgtgctatttattacaaggccagagaaatgggatttaaacatattaaccaccaggtggtgccaacactggctgtatcaaagaataaagcattaaaagcaattgaactgcaactaacgttagaaacaatatataactcacaatatagtaatgaaaagtggacattacaagacgttagccttgaagtgtatttaactgcaccaacaggatgtataaaaaaacatggatatacagtggaagtgcagtttgatggagacatatgcaatacaatgcattatacaaactggaaacatatatatatttgtgaagacacatcagtaactgtggtagagggtcaagttgactattatggtatatattatgttcatgaaggaatacaaacatattttgtgcagtttaaagatgatgcagaaaaatatagtaaaaataaagtatgggaagttcatgcgggtggtcaggtaatattatgtcctacatctgtgtttagcagcgacgaagtatcctctgctgaaattattaggcagcacttggccaaccactccgccgcgacccataccaaagccgtcgccttgggcaccaaagaaacacagacgactatccagcgaccaagatcagagccagacaccggaaacccctgccacaccaccaagttgttgcacagagactccgtggacagtgctccaatcctcactgcagttaacagctcacacaaaggacggattaactgtaatagtaacactacacccatagtacatttaaaaggtgatgctaatactttaaaatgtttaagatacagatttaaaaagcattgtaaattgtatacagcagtgtcgtccacatggcattggacaggacataatgtaaaacataaaagtgcaattgttacacttacatatgatagtgaatgtcaacgtgaacaatttttgtctcaagtgaaaataccaaaaactattacagtgtctactggatttatgtctatatgacaaatcttgatactgcatccacaacattactggcgtgctttttgctttgcttttgtgtgcttttgtgtgtctgcctattaatacgtccgctgcttttgtctgtgtctacatacacatcattaatactattggtattagtattgtggataacagcagcctctgcatttaggtgttttattgtatatattgtatttgtttatataccattatttttaatacatacacatgcacgcttcttaattacataatgtatatgtacataatgtaattgttacatataattgttgtataccataaattactattttttcttttttattttcatatataatttttttttttatttatttgtgtgttttttaataaactgttattacttaacaatgcgacacaaacgttctgcaaaacgcacaaaacgtgcatcggccacccaactttataaaacatgcaaacaggcaggtacatgtccacctgacattatacctaaggttgaaggcaaaactattgctgatgaaatattacaatatggaagtatgggtgtattttttggtgggttaggaattggaacagggtcgggtacaggcggacgcactgggtacattccattgggaacaaggcctcccacagctacagatacacttgctcctgtaagaccccctttaacagtagatcctgtgggcccttctgatccttctatagtttctttagtggaagaaactagttttattgatgctggtgcaccaacccctgtaccttccattcccccagatgtatcaggatttagtattacaacttcaactgataccacacctgctatattagatattaataatactgttactactgttactacacataataatcccacttttaccgacccatctgtattgcagcctccaacacctgcagaaactggagggcattttacactttcatcatccactattagtacacataattatgaagaaattcctatggatacatttattgttagcacaaaccctaacacagtaactagtagcacacccataccggggtctcgcccagtggcacgcctaggattatatagtcgcacaacacaacaagttaaggttgtggaccctgcttttgtaaccgctcccactaaacttattacatataataatcctgcatatgaaggtatagatgtggataatacattttattttcctagtaatgataatagtattaatatagctccagatcctgactttttggatatagttgctttacataggccagcattaacctctaggcgtactggcattagatacagtagaattggtaataaacaaacactacgtactcgtagtggaaaatctataggtgctaaggtacattattattatgatttaagtactattaatcctgcagaagaaatagaattacaaactataacaccttctacatatacaaccacttcccatgcagcctcaccaacttctattaataatggattatatgatatttatgcagatgactttattacagatactgttacaaccccagtaccagctataccctctacatccttatcaggttatattcctgcaaatacaacaattccttttggtggtgcatacaatattcctttagtatcaggacctgatatacctattaatacaactgaccaaactccttcattaattcctatagttccagggtctccacaatatacaattattgctgatggaggtgacttttatttacatcctagttattacatgttacgaaaacgacgtaaacgtttaccatattttttttcagatgtctctttggctgcctagtgaggccactgtctacttgcctcctgtcccagtatctaaagttgtaagcacggatgaatatgttgcacgcacaaacatatattatcatgcaggaacatccagactacttgcagttggacatccctattttcctattaaaaaacctaacaataacaaaatattagttcctaaagtatcaggattacaatacagggtatttagaatatatttacctgaccccaataagtttggttttcctgacacctcattttacaatccagatacacagcggctggtttgggcctgtgtaggtgttgaggtaggtcgtggtcagccattaggtgtgggcattagtggccatcctttattaaataaattggatgacacagaaaatgctagtgcttatgcagcaaatgcaggtgtggataatagagaatgtatatctatggattacaaacaaacacaattgtgtttaattggttgcaaaccacctataggggaacactggggcaaaggatccccatgtaacaatgttgcagtaactccaggtgattgtccaccattagagttaataaacacagttattcaggatggtgatatggttgataccggctttggtgctatggactttactacattacaggctaacaaaagtgaagttccactggatatttgtacatctatttgcaaatatccagattatattaaaatggtgtcagaaccatatggcgacagcttatttttttatttacgaagggaacaaatgtttgttagacatttatttaatagggctggtactgttggtgaaaatgtaccagacgatttatacattaaaggctctgggtctactgcaaatttagccagttcaaattattttcctacacctagtggttctatggttacctctgatgcccaaatatttaataaaccttattggttacaacgagcacagggccacaataatggcatttgttggggtaaccaactatttgttactgttgttgatactacacgcagtacaaatatgtcattatgtgctgccatatctacttcagaacctacatataaaaatactaactttaaagagtacctacgacatggggaggaatatgatttacagtttatttttcaactgtgcaaaataaccttaactgcagacgttatgtcatacatacattctatgaattccactattttggaggactggaattttggtttacaacctcctccaggaggcacactagaagatacttataggtttgtaacatcccaggcaattgcttgtcaaaaacatacacctccagcacctaaagaagatccccttaaaaaatatactttttgggaagtaaatttaaaagaaaagttttctgcagacctagatcagtttcctttaggacgcaaatttttactacaagcaggattgaaggccaaaccaaaatttacattaggaaaacgaaaagctacacccaccacctcatctacctctacaactgctaaacgcaaaaaacgtaagctgtaagtattgtatgtatgttgaattagtgttgtttgttgtgtatatgtttgtatgtgcttgtatgtgcttgtaaatattacgttgtatgtgtgtttgtatgtatggtataataaacacgtgtgtatgtgtttttaaatgcttgtgtaactattgtgtcatgcaacataaataaacttattgtttcatcacctactaattgtgttgtggttattcattgtatataaactatatttgctacattttgtttttgttttatatatactatattttgtagcgccagcggccattttgtagcttcaaccgaattcggttgcatgctttttggcacaaactgtatttttttaaatagttctatgtcagcaactatggtttaaacttgtacgtttcctgcttgccatgcgtgccaaatccctgttttcctgacctgcactgcttgccaaccattccattgttttttacactgcactatgtgcaactactgaatcactatgtacattgtgtcatataaaataaattactatgcgccaacgccttaaataccgctgttaggcacatatttttggcttgttttaactcacctaattgcatagttggcataaggtttaaacttttaaggccaactaaatgtcaccttagttcatacatgaactgtgtaaaggttagtcatacattgttcatttgtaaaactgcacatgggtgtgtgcaaaccgttttgggttacacatttacaaggaacttatataataatactaaactacaataattcatgtataaaactaagggcgtaaccgaaatcggttgaaccgaaaccggttagtataaaagcagacattttatgcaccaaaagagaactgcaatgtttcaggacccacaggagcgacccagaaagttaccacagttatgcacagagctgcaaacaactatacatgatataatattagaatgtgtgtactgcaagcaacagttactgcgacgtgaggtatatgactttgcttttcgggatttatgcatagtatatagagatgggaatccatatgcagtgtgtgataaatgtttaaagttttattctaaaattagtgagtatagatattattgttatagtgtgtatggaacaacattagaacagcaatacaacaaaccgttgtgtgatttgttaattaggtgtattaactgtcaaaagccactgtgtcctgaagaaaagcaaagacatctggacaaaaagcaaagattccataatataaggggtcggtggaccggtcgatgtatgtcttgttgcagatcatcgagaacacgtagagaaacccagctgtaatcatgcatggagatacacctacattgcatgaatatatgttagatttgcaaccagagacaactgatctctactgttatgagcaattaaatgacagctcagaggaggaggatgaaatagatggtccagctggacaagcagaaccggacagagcccattacaatattgtaaccttctgttgcaagtgtgactctacgcttcggttgtgcgtacaaagcacacacgtagacatccgtacgttggaagacctgttaatgggcacactaagaattgtgtgccccatctgttctcagaaaccataatctacc

SEQ ID NO: 2 - DNA, 7906 bp, Homo sapiens
  source 1..7906: mol_type = genomic DNA; note = UNCseq0848
atggctgatcctgcaggtaccaatggggaagagggtacgggatgtaatggatggttttatgtagaggctgtagtggaaaaaaaaacaggggatgctatatcagatgacgagaacgaaaatgacagtgatacaggtgaagatttggtagattttatagtaaatgataatgattatttaacacaggcagaaacagagacagcacatgcgttgtttactgcacaggaagcaaaacaacatagagatgcagtacaggttctaaaacgaaagtatttgggtagtccacttagtgatattagtggatgtgtagacaataatattagtcctagattaaaagctatatgtatagaaaaacaaagtagagctgcaaaaaggagattatttgaaagcgaagacagcgggtatggcaatactgaagtggaaactcagcagatgttacaggtagaagggcgccatgagactgaaacaccatgtagtcagtatagtggtggaagtgggggtggttgcagtcagtacagtagtggaagtgggggagagggtgttagtgaaagacacactatatgccaaacaccacttacaaatattttaaatgtactaaaaactagtaatgcaaaggcagcaatgttagcaaaatttaaagagttatacggggtgagttttacagaattagtaagaccatttaaaagtaataaatcaacgtgttgcgattggtgtattgctgcatttggacttacacccagtatagctgacagtataaaaacactattacaacaatattgtttatatttacacattcaaagtttagcatgttcatggggaatggttgtgttactattagtaagatataaatgtggaaaaaatagagaaacaattgaaaaattgctgtctaaactattatgtgtgtctccaatgtgtatgatgatagagcctccaaaattgcgtagtacagcagcagcattatattggtataaaacaggtatatcaaatattagtgaagtgtatggagacacgccagaatggatacaaagacaaacagtattacaacatagttttaatgattgtacatttgaattatcacagatggtacaatgggcctacgataatgacatagtagacgatagtgaaattgcatataaatatgcacaattggcagacactaatagtaatgcaagtgcctttctaaaaagtaattcacaggcaaaaattgtaaaggattgtgcaacaatgtgtagacattataaacgagcagaaaaaaaacaaatgagtatgagtcaatggataaaatatagatgtgatagggtagatgatggaggtgattggaagcaaattgttatgtttttaaggtatcaaggtgtagagtttatgtcatttttaactgcattaaaaagatttttgcaaggcatacctaaaaaaaattgcatattactatatggtgcagctaacacaggtaaatcattatttggtatgagtttaatgaaatttctgcaagggtctgtaatatgttttgtaaattctaaaagccatttttggttacaaccattagcagatgccaaaataggtatgttagatgatgctacagtgccctgttggaactatatagatgacaatttaagaaatgcattggatggaaatttagtttctatggatgtaaagcatagaccattggtacaactaaaatgccctccattattaattacatctaacattaatgctggtacagattctaggtggccttatttacataatagattggtggtgtttacatttcctaatgagtttccatttgacgaaaacggaaatccagtgtatgagcttaatgataagaactggaaatcctttttctcaaggacgtggtccagattaagtttgcacgaggacgaggacaaggaaaacgatggagactctttgccaacgtttaaatgtgtgtcaggacaaaatactaacacattatgaaaatgatagtacagacctacgtgaccatatagactattggaaacacatgcgcctagaatgtgctatttattacaaggccagagaaatgggatttaaacatattaaccaccaggtggtgccaacgctggctgtatcaaagaataaagcattacaagcaattgaactgcaactaacgttagaaacaatatataactcacaatatagtaatgaaaagtggacattacaagacgttagccttgaagtgtatttaactgcaccaacaggatgtataaaaaaacatggatatacagtggaagtgcagtttgatggagacatatgcaatacaatgcattatacaaactggacacatatatatatttgtgaagaagcatcagtaactgtggtagagggtcaagttgactattatggtttatattatgttcatgaaggaatacgaacatattttgtgcagtttaaagatgatgcagaaaaatatagtaaaaataaagtatgggaagttcatgcgggtggtcaggtaatattatgtcctacatctgtgtttagcagcaacgaagtatcctctcctgaaactattaggcagcacttggccaaccactccgccgcgacccataccaaagccgtcgccttgggcaccgaagaaacacagacgactatccagcgaccaagatcagagccagacaccggaaacccctgccacaccactaagttgttgcacagagactcagtggacagtgctccaatcctcactgcatttaacagctcacacaaaggacggattaactgtaatagtaacactacacccatagtacatttaaaaggtgatgctaatactttaaaatgtttaagatatagatttaaaaagcattgtaaattgtatactgcagtgtcgtctacatggcattggacaggacataatgtaaaacataaaagtgcaattgttacacttacatatgatagtgaatggcaacgtgaccaatttttgtctcaagttaaaataccaaaaactattacagtgtctactggatttatgtctatatgacaaatgtttatactgcattcacaacattactggcgtgctttttgctttgcttttgtgtgcttttgtgtgtctgcctattaatacgtccgctgcttttgtctgtgtctacatacacatcattaatactattggtattactattgtggataacagcagcctctgcgtttaggtgttttattgtatatattgtatttgtttatataccattatttttaatacatacacatgcacgctttttaattacataatgtatatgtacataatgtaattgttacatataattgttgtataccataacttactattttttcttttttatttttatatataatttttttttttgtttgtttgtttgttttttaataaactgttattacttaacaatgcgacacaaacgttctgcaaaacgcacaaaacgtgcatcggctacccaactttataaaacatgcaaacaggcaggtacatgtccacctgacattatacctaaggttgaaggcaaaactattgctgatcaaatattacaatatggaagtatgggtgtattttttggtgggttaggaattggaacagggtcgggtacaggcggacgcactgggtatattccattgggaacaaggcctcccacagctacagatacacttgctcctgtaagaccccctttaacagtagatcctgtgggcccttctgatccttctatagtttctttagtggaagaaactagttttattgatgctggtgcaccaacatctgtaccttccatccccccagatgtatcaggatttagtattactacttcaactgataccacacctgctatattggatattaataatactgttactactgttactacacataataatcccactttcactgacccatctgtattgcagcctccaacacctgcagaaactggagggcattttacactttcatcatccactattagtacacataattatgaagaaattcctatggatacatttattgttagcacaaaccctaacacagtaactagtagcacacccataccagggtctcgcccagtggcacgcctaggattatatagtcgcacaacacaacaagttaaagttgtagaccctgcttttgtaaccactcccactaaacttattacatatgataatcctgcatatgaaggtatagatgtggataatacattatattttcctagtaataataatagtattaatatagctccagatcctgactttttggatatagttgctttacataggccagcattaacctctaggcgtactggcattaggtacagtagaattggtaataaacaaacactacgtactcgtagtggaaaatctataggtgctaaggtacattattattatgatttgagtactattgatcctgcagaagaaatagaattacaaactataacaccttctacatatactaccacttcacatgcagcctcacctacttctattaataatggattatatgatatttatgcagatgactttattacagatacttctacaaccccggtaccatctgtaccctctacatctttatcaggttatattcctgcaaatacaacaattccttttggtggtgcatacaatattcctttagtatcaggtcctgatatacccattaatataactgaccaagctccttcattaattcctatagttccagggtctccacaatatacaattattgctgatgcaggtgacttttatttacatcctagttattacatgttacgaaaacgacgtaaacgtttaccatattttttttcagatgtctctttggctgcctagtgaggccactgtctacttgcctcctgtcccagtatctaaggttgtaagcacggatgaatatgttgcacgcacaaacatatattatcatgcaggaacatccagactacttgcagttggacatccctattttcctattaaaaaacctaacaataacaaaatattagttcctaaagtatcaggattacaatacagggtatttagaatacatttacctgaccccaataagtttggttttcctgacacctcattttataatccagatacacagcggctggtttgggcctgtgtaggtgttgaggtaggtcgtggtcagccattaggtgtgggcattagtggccatcctttattaaataaattggatgacacagaaaatgctagtgcttatgcagcaaatgcaggtgtggataatagagaatgtatatctatggattacaaacaaacacaattgtgtttaattggttgcaaaccacctataggggaacactggggcaaaggatccccatgtaccaatgttgcagtaaatccaggtgattgtccaccattagagttaataaacacagttattcaggatggtgatatggttgatactggctttggtgctatggactttactacattacaggctaacaaaagtgaagttccactagatatttgtacatctatttgcaaatatccagattatattaaaatggtgtcagaaccatatggcgacagcttatttttttatttacgaagggaacaaatgtttgttagacatttatttaatagggctggtgctgttggtgaaaatgtaccagacgatttatacattaaaggctctgggtctactgcaaatttagccagttcaaattattttcctacacctagtggttctatggttacctctgatgcccaaatattcaataaaccttattggttacaacgagcacagggccacaataatggcatttgttggggtaaccaactatttgttactgttgttgatactacacgcagtacaaatatgtcattatgtgctgccatatctacttcagaaactacatataaaaatactaactttaaggagtacctacgacatggggaggaatatgatttacagtttatttttcaactgtgcaaaataaccttaactgcagacgttatgacatacatacattctatgaattccactattttggaggactggaattttggtctacaaccccccccaggaggcacactagaagatacttataggtttgtaacatcccaggcaattgcttgtcaaaaacatacacctccagcacctaaagaagatccccttaaaaaatacactttttgggaagtaaatttaaaggaaaagttttctgcagacctagatcagtttcctttaggacgcaaatttttactacaagcaggattgaaggccaaaccaaaatttacattaggaaaacgaaaagctacacccaccacctcatctacctctacaactgctaaacgcaaaaaacgtaagctgtaagtattgtatgtatgttgaattagtgttgtttgttgtttatatgtttgtatgtgcttgtatgtgcttgtaaatattaagttgtatgtgtgtttgtatgtatggtataataaacacgtgtgtatgtgtttttaaatgcttgtgtaactattgtgtgatgcaacataaataaacttattgtttcaacacctactaattgtgttgtggttattcattgtatataaactatatttgctacatcctgtttttgttttatatatactatattttgtagcgccagcggccattttgtagcttcaaccgaattcggttgcatgctttttggcacaaaatgtgtttttttaaatagttctatgtcagcaactatagtttaaacttgtacgtttcctgcttgccatgcgtgccaaatccctgttttcctgacctgcactgcttgccaaccattccattgttttttacactgcactatgtgcaactactgaatcactatgtacattgtgtcatataaaataaatcactatgcgccaacgccttacataccgctgttaggcacatatttttggcttgttttaactaacctaattgcatatttggcataaggtttaaacttctaaggccaactaaatgtcaccctagttcatacatgaactgtgtaaaggttagtcatacattgttcatttgtaaaactgcacatgggtgtgtgcaaaccgttttgggttacacatttacaagcaacttatataataatactaaactacaataatccatgtataaaactaagggcgtaaccgaaatcggttgaaccgaaaccggttagtataaaagcagacattttatgcaccaaaagagaactgcaatgtttcaggacccacaggagcgacccggaaagttaccacagttatgcacagagctgcaaacaactatacatgatataatattagaatgtgtgtactgcaagcaacagttactgcgacgtgaggtatatgactttgcttttcgggatttatgcatagtatatagagatgggaatccatatgctgtatgtgataaatgtttaaagttttattctaaaattagtgagtatagacattattgttatagtgtgtatggaacaacattagaacagcaatacaacaaaccgttgtgtgatttgttaattaggtgtattaactgtcaaaagccactgtgtcctgaagaaaagcaaagacatctggacaaaaagcaaagattccataatataaggggtcggtggaccggtcgatgtatgtcttgttgcagatcatcaagaacacgtagagaaacccagctgtaatcatgcatggagatacacctacattgcatgaatatatgttagatttgcaaccagagacaactgatctctactgttatgagcaattaaatgacagctcagaggaggaggatgaaatagatggtccagctggacaagcagaaccggacagagcccattacaatattgtaaccttttgttgcaagtgtgactctacgcttcggttgtgcgtacaaagcacacacgtagacattcgtactttggaagacctgttaatgggcacactaggaattgtgtgccccatctgttctcagaaaccataatctacc

SEQ ID NO: 3 - DNA, 7906 bp, Homo sapiens
  source 1..7906: mol_type = genomic DNA; note = UNCseq1009
atggctgatcctgcaggtaccaatggggaagagggtacgggatgtaatggatggttttatgtagaggctgtagtggaaaaaaaaacaggggatgctatatcagatgacgagaacgaaaatgacagtgatacaggtgaagatttggtagattttatagtaaatgataatgattatttaacacaggcagaaacagagacagcacatgcgttgtttactgcacaggaagcaaaacaacatagagatgcagtacaggttctaaaacgaaagtatttgggtagtccacttagtgatattagtggatgtgtagacaataatattagtcctagattaaaagctatatgtatagaaaaacaaagtagagctgcaaaaaggagattatttgaaagcgaagacagcgggtatggcaatactgaagtggaaactcagcagatgttacaggtagaagggcgccatgagactaaaacaccatgtagtcagtatagtggtggaagtgggggtggttgcagtcagtacagtagtggaagtgggggagagggtgttagtgaaagacacactatatgccaaacaccacttacaaatattttaaatgtactaaaaactagtaatgcaaaggcagcaatgttagcaaaatttaaagagttatacggggtgagtttttcagaattagtaagaccatttaaaagtaataaatcaacgtgttgcgattggtgtattgctgcatttggacttacacccagtatagctgacagtataaaaacactattacaacaatattgtttatatttacacattcaaagtttagcatgttcatggggaatggttgtgttactattagtaagatataaatgtggaaaaaatagagaaacaattgaaaaattgctgtctaaactattatgtgtgtctccaatgtgtatgatgatagagcctccaaaattgcgtagtacagcagcagcattatattggtataaaacaggtatatcaaatattagtgaagtgtatggagacacgccagaatggatacaaagacaaacagtattacaacatagttttaatgattgtacatttgaattatcacagatggtacaatgggcctacgataatgacatagtagacgatagtgaaattgcatataaatatgcacaattggcagacactaatagtaatgcaagtgcctttctaaaaagtaattcacaggcaaaaattgtaaaggattgtgcaacaatgtgtagacattataaacgagcagaaaaaaaacaaatgagtatgagtcaatggataaaatatagatgtgatagggtagatgatggaggtgattggaagcaaattgttatgtttttaaggtatcaaggtgtagagtttatgtcatttttaactgcattaaaaagatttttgcaaggcatacctaaaaaaaattgcatattactatatggtgcagctaacacaggtaaatcattatttggtatgagtttaatgaaatttctgcaagggtctgtaatatgttttgtaaattctaaaagccatttttggttacaaccattagcagatgccaaaataggtatgttagatgatgctacagtgccctgttggaactacatagatgacaatttaagaaatgcattggatggaaatttagtttctatggatgtaaagcatagaccattggtacaactaaaatgccctccattattaattacatctaacattaatgctggtacagattctaggtggccttatttacataatagattggtggtgtttacatttcctaatgagtttccatttgacgaaaacggaaatccagtgtatgagcttaatgataagaactggaaatcctttttctcaaggacgtggtccagattaagtttgcacgaggacgaggacaaggaaaacgatggagactctttgccaacgtttaaatgtgtgtcaggacaaaatactaacacattatgaaaatgatagtacagacctacgtgaccatatagactattggaaacacatgcgcctagaatgtgctatttattacaaggccagagaaatgggatttaaacatattaaccaccaggtggtgccaacactggctgtatcaaagaataaagcattacaagcaattgaactgcaactaacgttagaaacaatatataactcacaatatagtaatgaaaagtggacattacaagacgttagccttgaagtgtatttaactgcaccaacaggatgtataaaaaaacatggatatacagtggaagtgcagtttgatggagacatatgcaatacaatgcattatacaaactggacacatatatatatttgtgaagaagcatcagtaactgtggtagagggtcaagttgactattatggtttatattatgttcatgaaggaatacgaacatattttgtgcagtttaaagatgatgcagaaaaatatagtaaaaataaagtatgggaagttcatgcgggtggtcaggtaatattatgtcctacatctgtgtttagcagcaacgaagtatcctctcctgaaattattaggcagcacttggccaaccaccccgccgcgacccataccaaagccgtcgccttgggcaccgaagaaacacagacgactatccagcgaccaagatcagagccagacaccggaaacccctgccacaccactaagttgttgcacagagactcagtggacagtgctccaatcctcactgcatttaacagctcacacaaaggacggattaactgtaatagtaacactacacccatagtacatttaaaaggtgatgctaatactttaaaatgtttaagatatagatttaaaaagcattgtacattgtatactgcagtgtcgtctacatggcattggacaggacataatgtaaaacataaaagtgcaattgttacacttacatatgatagtgaatggcaacgtgaccaatttttgtctcaagttaaaataccaaaaactattacagtgtctactggatttatgtctatatgacaaatcttgatactgcatccacaacattactggcgtgctttttgctttgcttttgtgtgcttttgtgtgtctgcctattaatacgtccgctgcttttgtctgtgtctacatacacatcattaataatattggtattactattgtggataacagcagcctctgcgtttaggtgttttattgtatatattatatttgtttatataccattatttttaatacatacacatgcacgctttttaattacataatgtatatgtacataatgtaattgttacatataattgttgtataccataacttactattttttcttttttattttcatatataatttttttttttgtttgtttgtttgttttttaataaactgttattacttaacaatgcgacacaaacgttctgcaaaacgcacaaaacgtgcatcggctacccaactttataaaacatgcaaacaggcaggtacatgtccacctgacattatacctaaggttgaaggcaaaactattgctgatcaaatattacaatatggaagtatgggtgtattttttggtgggttaggaattggaacagggtcgggtacaggcggacgcactgggtatattccattgggaacaaggcctcccacagctacagatacacttgctcctgtaagaccccctttaacagtagatcctgtgggcccttctgatccttctatagtttctttagtggaagaaactagttttattgatgctggtgcaccaacatctgtaccttccattcccccagatgtatcaggatttagtattactacttcaactgataccacacctgctatattagatattaataatactgttactactgttactacacataataatcccactttcactgacccatctgtattgcagcctccaacacctgcagaaactggagggcattttacactttcatcatccactattagtacacataattatgaagaaattcctatggatacatttattgttagcacaaaccctaacacagtaactagtagcacacccataccagggtctcgcccagtggcacgcctaggattatatagtcgcacaacacaacaggttaaagttgtagaccctgcttttgtaaccactcccactaaacttattacatatgataatcctgcatatgaaggtatagatgtggataatacattatatttttctagtaatgataatagtattaatatagctccagatcctgactttttggatatagttgctttacataggccagcattaacctctaggcgtactggcattaggtacagtagaattggtaataaacatacactacgtactcgtagtggaaaatctataggtgctaaggtacattattattatgatttcagtactattgatcctgcagaagaaatagaattacaaactataacaccttctacatatactaccacttcacatgcagcctcacctacttctattaataatggattatatgatatttatgcagatgactttattacagatacttctacaaccccggtaccatctgtaccctctacatctttatcaggttatattcctgcaaatacaacaattccttttggtggtgcatacaatattcctttagtatcaggtcctgatatacccattaatataactgaccaagctccttcattaattcctatagttccagggtctccacaatatacaattattgctgatgcaggtgacttttatttacatcctagttattacatgttacgaaaacgacgtaaacgtttaccatattttttttcagatgtctctttggctgcctagtgaggccactgtctacttgcctcctgtcccagtatctaaggttgtaagcacggatgaatatgttgcacgcacaaacatatattatcatgcaggaacatccagactacttgcagttggacatccctattttcctattaaaaaacctaacaataacaaaatattagttcctaaagtatcaggattacaatacagggtatttagaatacatttacctgaccccaataagtttggttttcctgacacctcattttataatccagatacacagcggctggtttgggcctgtgtaggtgttgaggtaggtcgtggtcagccattaggtgtgggcattagtggccatcctttattaaataaattggatgacacagaaaatgctagtgcttatgcagcaaatgcaggtgtggataatagagaatgtatatctatggattacaaacaaacacaattgtgtttaattggttgcaaaccacctataggggaacactggggcaaaggatccccatgtaccaatgttgcagtaaatccaggtgattgtccaccattagagttaataaacacagttattcaggatggtgatatggttgatactggctttggtgctatggactttactacattacaggctaacaaaagtgaagttccactggatatttgtacatctatttgcaaatatccagattatattaaaatggtgtcagaaccatatggcgacagcttatttttttatttacgaagggaacaaatgtttgttagacatttatttaatagggctggtactgttggtgaaactgtaccagacgatttatacattaaaggctctgggtctactgcaaatttagccagttcaaattattttcctacacctagtggttctatggttacctctgatgcccaaatattcaataaaccttattggttacaacgagcacagggccacaataatggcatttgttggggtaaccaactatttgttactgttgttgatactacacgcagtacaaatatgtcattatgtgctgccatatctacttcagaaactacatataaaaatactaactttaaggagtacctacgacatggggaggaatatgatttacagtttatttttcaactgtgcaaaataaccttaactgcagacgttatgacatacatacattctatgaattccactattttggaggactggaattttggtctacaacctcccccaggaggcacactagaagatacttataggtttgtaacatcccaggcaattgcttgtcaaaaacatacacctccagcacctaaagaagatccccttaaaaaatacactttttgggaagtaaatttaaaggaaaagttttctgcagacctagatcagtttcctttaggacgcaaatttttactacaagcaggattgaaggccaaaccaaaatttacattaggaaaacgaaaagctacacccaccacctcatctacctctacaactgctaaacgcaaaaaacgtaagctgtaagtattgtatgtatgttgaattagtgttgtttgttgtgtatatgtttgtatgtgcttgtatgtgcttgtaaatattaagttgtatgtgtgtttgtatgtatggtataataaacacgtgtgtatgtgtttttaaatgcttgtgtaactattgtgtcatgcaccataaataaacttattgtttcaacacctactaattgtgttgtggttattcattgtatataaactatatttgctacatcctgtttttgttttatatatactatattttgtagcgccagcggccattttgtagcttcaaccgaattcggttgcatgctttttggcacaaaatgtgtttttttaaatagttctatgtcagcaactatggtttaaacttgtacgtttcctgcttgccatgcgtgccaaatccctgttttcctgacctgcactgcttgccaaccattccattgttttttacactgcactatgtgcaactactgaatcactatgtacattgtgtcatataaaataaatcactatgcgccaacgccttacataccgctgttaggcacatatttttggcttgttttaactaacctaattgcatatttggcataaggtttaaacttctaaggccaactaaatgtcaccctagttcatacatgaactgtgtaaaggttagtcatacattgttcatttgtaaaactgcacatgggtgtgtgcaaaccgttttgggttacacatttacaagcaacttatataataatactaaactacaataattcatgtataaaactaagggcgtaaccgaaatcggttgaaccgaaaccggttagtataaaagcagacattttatgcaccaaaagagaactgcaatgtttcaggacccacaggagcgacccagaaagttaccacagttatgcacagagctgcaaacaactatacatgatataatattagaatgtgtgtactgcaagcaacagttactgcgacgtgaggtatatgactttgcttttcgggatttatgcatagtatatagagatgggaatccatatgctgtatgtgataaatgtttaaagttttattctaaaattagtgagtatagacattattgttatagtttgtatggaacaacattagaacagcaatacaacaaaccgttgtgtgatttgttaattaggtgtattaactgtcaaaagccactgtgtcctgaagaaaagcaaagacatctggacaaaaagcaaagattccataatataaggggtcggtggaccggtcgatgtatgtcttgttgcagatcatcaagaacacgtagagaaacccagctgtaatcatgcatggagatacacctacattgcatgaatatatgttagatttgcaaccagagacaactgatctctactgttatgagcaattaaatgacagctcagaggaggaggatgaaatagatggtccagctggacaagcagaaccggacagagcccattacaatattgtaaccttttgttgcaagtgtgactctacgcttcggttgtgcgtacaaagcacacacgtagacattcgtactttggaagacctgttaatgggcacactaggaattgtgtgccccatctgttctcagaaaccataatctacc

SEQ ID NO: 4 - DNA, 7906 bp, Homo sapiens
  source 1..7906: mol_type = genomic DNA; note = UNCseq1140
atggctgatcctgcaggtaccaatggggaagagggtacgggatgtaatggatggttttatgtagaggctgtagtggaaaaaaaaacaggggatgctatatcagatgacgagaacgaaaatgacagtgatacaggtgaagatttggtagattttatagtaaatgataatgattatttaacacaggcagaaacagagacagcacatgcgttgtttactgcacaggaagcaaaacaacatagagatgcagtacaggttctaaaacgaaagtatttgggtagtccacttagtgatattagtggatgtgtagacaataatattagtcctagattaaaagctatatgtatagaaaaacaaagtagagctgcaaaaaggagattatttgaaagcgaagacagcgggtatggcaatactgaagtggaaactcagcagatgttacaggtagaagggcgccatgagactgaaacaccatgtagtcagtatagtggtggaagtgggggtggttgcagtcagtacagtagtggaagtgggggagagggtgttagtgaaagacacactatatgccaaacaccacttacaaatattttaaatgtactaaaaactagtaatgcaaaggcagcaatgttagcaaaatttaaagagttatacggggtgagttttacagaattagtaagaccatttaaaagtaataaatcaacgtgttgcgattggtgtattgctgcatttggacttacacccagtatagctgacagtataaaaacactattacaacaatattgtttatatttacacattcaaagtttagcatgttcatggggaatggttgtgttactattagtaagatataaatgtggaaaaaatagagaaacaattgaaaaattgctgtctaaactattatgtgtgtctccaatgtgtatgatgatagagcctccaaaattgcgtagtacagcagcagcattatattggtataaaacaggtatatcaaatattagtgaagtgtatggagacacgccagaatggatacaaagacaaacagtattacaacatagttttaatgattgtacatttgaattatcacagatggtacaatgggcctacgataatgacatagtagacgatagtgaaattgcatataaatatgcacaattggcagacactaatagtaatgcaagtgcctttctaaaaagtaattcacaggcaaaaattgtaaaggattgtgcaacaatgtgtagacattataaacgagcagaaaaaaaacaaatgagtatgagtcaatggataaaatatagatgtgatagggtagatgatggaggtgattggaagcaaattgttatgtttttaaggtatcaaggtgtagagtttatgtcatttttaactgcattaaaaagatttttgcaaggcatacctaaaaaaaattgcatattactatatggtgcagctaacacaggtaaatcattatttggtatgagtttaatgaaatttctgcaagggtctgtaatatgttttgtaaattctaaaagccatttttggttacaaccattagcagatgctaaaataggtatgttagatgatgctacagtgccctgttggaactatatagatgacaatttaagaaatgcattggatggaaatttagtttctatggatgtaaagcatagaccattggtacaactaaaatgccctccattattaattacatctaacattaatgctggtacagattctaggtggccttatttacataatagattggtggtgtttacatttcctaatgagtttccatttgacgaaaacggaaatccagtgtatgagcttaatgataagaactggaaatcctttttctcaaggacgtggtccagattaagtttgcacgaggacgaggacaaggaaaacgatggagactctttgccaacgtttaaatgtgtgtcaggacaaaatactaacacattatgaaaatgatagtacagacctacgtgaccatatagactattggaaacacatgcgcctagaatgtgctatttattacaaggccagagaaatgggatttaaacatattaaccaccaggtggtgccaacgctggctgtatcaaagaataaagcattacaagcaattgaactgcaactaacgttagaaacaatatataactcacaatatagtaatgaaaagtggacattacaagacgttagccttgaagtgtatttaactgcaccaacaggatgtataaaaaaacatggatatacagtggaagtgcagtttgatggagacatatgcaatacaatgcattatacaaactggacacatatatatatttgtgaagaagcatcagtaactgtggtagagggtcaagttgactattatggtttatattatgttcatgaaggaatacgaacatattttgtgcagtttaaagatgatgcagaaaaatatagtaaaaataaagtatgggaagttcatgcgggtggtcaggtaatattatgtcctacatctgtgtttagcagcaacgaagtatcctctcctgaaactattaggcagcacttggccaaccactccgccgcgacccataccaaagccgtcgccttgggcaccgaagaaacacagacgactatccagcgaccaagatcagagccagacaccggaaacccctgccacaccactaagttgttgcacagagactcagtggacagtgctccaatcctcactgcatttaacagctcacacaaaggacggattaactgtaatagtaacactacacccatagtacatttaaaaggtgatgctaatactttaaaatgtttaagatatagatttaaaaagcattgtaaattgtatactgcagtgtcgtctacatggcattggacaggacataatgtaaaacataaaagtgcaattgttacacttacatatgatagtgaatggcaacgtgaccaatttttgtctcaagttaaaataccaaaaactattacagtgtctactggatttatgtctatatgacaaatcttgatactgcatccacaacattactggcgtgctttttgctttgcttttgtgtgcttttgtgtgtctgcctattaatacgtccgctgcttttgtctgtgtctacatacacatcattaatactattggtattactattgtggataacagcagcctctgcgtttaggtgttttattgtatatattgtatttgtttatataccattatttttaatacatacacatgcacgctttttaattacataatgtatatgtacataatgtaattgttacatataattgttgtataccataacttactattttttgttttttatttttatatataatttttttttttgtttgtttgtttgttttttaataaactgttattacttaacaatgcgacacaaacgttctgcaaaacgcacaaaacgtgcatcggctacccaactttataaaacatgcaaacaggcaggtacatgtccacctgacattatacctaaggttgaaggcaaaactattgctgatcaaatattacaatatggaagtatgggtgtattttttggtgggttaggaattggaacagggtcgggtacaggcggacgcactgggtatattccattgggaacaaggcctcccacagctacagatacacttgctcctgtaagaccccctttaacagtagatcctgtgggcccttctgatccttctatagtttctttagtggaagaaactagttttattgatgctggtgcaccaacatctgtaccttccattcccccagatgtatcaggatttagtattactacttcaactgataccacacctgctatattagatattaataatactgttactactgttactacacataataatcccactttcactgacccatctgtattgcagcctccaacacctgcagaaactggagggcattttacactttcatcatccactattagtacacataattatgaagaaattcctatggatacatttattgttagcacaaaccctaacacagtaactagtagcacacccataccagggtctcgcccagtggcacgcctaggattatatagtcgcacaacacaacaagttaaagttgtagaccctgcttttgtaaccactcccactaaacttattacatatgataatcctgcatatgaaggtatagatgtggataatacattatatttttctagtaatgataatagtattaatatagctccagatcctgactttttggatatagttgctttacataggccagcattaacctctaggcgtactggcattaggtacagtagaattggtaataaacaaacactacgtactcgtagtggaaaatctataggtgctaaggtacattattattatgatttgagtactattgatcctgcagaagaaatagaattacaaactataacaccttctacatatactaccacttcacatgcagcctcacctacttctattaataatggattatatgatatttatgcagatgactttattacagatacttctacaaccccggtaccatctgtaccctctacatctttatcgggttatattcctgcaaatacaacaattccttttggtggtgcatacaatattcctttggtatcaggtcctgatatacccattaatataactgaccaagctccttcattaattcctatagttccagggtctccacaatatacaattattgctgatgcaggtgacttttatttacatcctagttattacatgttacgaaaacgacgtaaacgtttaccatattttttttcagatgtctctttggctgcctagtgaggccactgtctacttgcctcctgtcccagtatctaaggttgtaagcacggatgaatatgttgcacgcacaaacatatattatcatgcaggaacatccagactacttgcagttggacatccctattttcctattaagaaacctaacaataacaaaatattagttcctaaagtatcaggattacaatacagggtatttagaatacatttacctgaccccaataagtttggttttcctgacacctcattttataatccagatacacagcggctggtttgggcctgtgtaggtgttgaggtaggtcgtggtcagccattaggtgtgggcattagtggccatcctttattaaataaattggatgacacagaaaatgctagtgcttatgcagcaaatgcaggtgtggataatagagaatgtatatctatggattacaaacaaacacaattgtgtttaattggttgcaaaccacctataggggaacactggggcaaaggatccccatgtaccaatgttgcagtaaatccaggtgattgtccaccattagagttaataaacacagttattcaggatggtgatatggttgatactggctttggtgctatggactttactacattacaggctaacaaaagtgaagttccactggatatttgtacatctatttgcaaatatccagattatattaaaatggtgtcagaaccatatggcgacagcttatttttttatttacgaagggaacaaatgtttgttagacatttatttaatagggctggtgctgttggtgaaaatgtaccagacgatttatacattaaaggctctgggtctactgcaaatttagccagttcaaattattttcctacacctagtggttctatggttacctctgatgcccaaatattcaataaaccttattggttacaacgagcacagggccacaataatggcatttgttggggtaaccaactatttgttactgttgttgatactacacgcagtacaaatatgtcattatgtgctgccatatctacttcagaaactacatataaaaatactaactttaaggagtacctacgacatggggaggaatatgatttacagtttatttttcaactgtgcaaaataaccttaactgcagacgttatgacatacatacattctatgaattccactattttggaggactggaattttggtctacaacctcccccaggaggcacactagaagatacttataggtttgtaacatcccaggcaattgcttgtcaaaaacatacacctccagcacctaaagaagatccccttaaaaaatacactttttgggaagtaaatttaaaggaaaagttttctgcagacctagatcagtttcctttaggacgcaaatttttactacaagcaggattaaaggccaaaccaaaatttacattaggaaaacgaaaagctacacccaccacctcatctacctctacaactgctaaacgcaaaaaacgtaagctgtaagtattgtatgtatgttgaattggtgttgtttgttgtttatatgtttgtatgtgcttgtatgtgcttgtaaatattaagttgtatgtgtgtttgtatgtatggtataataaacacgtgtgtatgtgtttttaaatgcttgtgtaactattgtgtcatgcaacataaataaacttattgtttcaacacctactaattgtgttgtggttattcattgtatataaactatatttgctacatcctgtttttgttttatatatactatattttgtagcgccagcggccattttgtagcttcaaccgaattcggttgcatgctttttggcacaaaatgtgtttttttaaatagttctatgtcagcaactatagtttaaacttgtacgtttcctgcttgccatgcgtgccaaatccctgttttcctgacctgcactgcttgccaaccattccattgttttttacactgcactatgtgcaactactgaatcactatgtacattgtgtcatataaaataaatcactatgcgccaacgccttacataccgctgttaggcacatatttttggcttgttttaactaacctaattgcatatttggcataaggtttaaacttctaaggccaactaaatgtcaccctagttcatacatgaactgtgtaaaggttagtcatacattgttcatttgtaaaactgcacatgggtgtgtgcaaaccgttttgggttacacatttacaagcaacttatataataatactaaactacaataattcatgtataaaactaagggcgtaaccgaaatcggttgaaccgaaaccggttagtataaaagcagacattttatgcaccaaaagagaactgcaatgtttcaggacccacaggagcgacccagaaagttaccacagttatgcacagagctgcaaacaactatacatgatataatattagaatgtgtgtactgcaagcaacagttactgcgacgtgaggtatatgactttgcttttcgggatttatgcatagtatatagagatgggaatccatatgctgtatgtgataaatgtttaaagttttattctaaaattagtgagtatagacattattgttatagtttgtatggaacaacattagaacagcaatacaacaaaccgttgtgtgatttgttaattaggtgtattaactgtcaaaagccactgtgtcctgaagaaaagcaaagacatctggacaaaaagcaaagattccataatataaggggtcggtggaccggtcgatgtatgtcttgttgcagatcatcaagaacacgtagagaaacccagctgtaatcatgcatggagatacacctacattgcatgaatatatgttagatttgcaaccagagacaactgatctctactgttatgagcaattaaatgacagctcagaggaggaggatgaaatagatggtccagctggacaagcagaaccggacagagcccattacaatattgtaaccttttgttgcaagtgtgactctacgcttcggttgtgcgtacaaagcacacacgtagacattcgtactttggaagacctgttaatgggcacactaggaattgtgtgccccatctgttctcagaaaccataatctacc

SEQ ID NO: 5 - DNA, 7906 bp, Homo sapiens
  source 1..7906: mol_type = genomic DNA; note = UNCseq1310
atggctgatcctgcaggtaccaatggggaagagggtacgggatgtaatggatggttttatgtagaggctgtagtggaaaaaaaaacaggggatgctatatcagatgacgagaacgaaaatgacagtgatacaggtgaagatttggtagattttatagtaaatgataatgattatttaacacaggcagaaacagagacagcacatgcgttgtttactgcacaggaagcaaaacaacatagagatgcagtacaggttctaaaacgaaagtatttgggtagtccacttagtgatattagtggatgtgtagacaataatattagtcctagattaaaagctatatgtatagaaaaacaaagtagagctgcaaaaaggagattatttgaaagcgaagacagcgggtatggcaatactgaagtggaaactcagcagatgttacaggtagaagggcgccatgagactgaaacaccatgtagtcagtatagtggtggaagtgggggtggttgcagtcagtacagtagtggaagtgggggagagggtgttagtgaaagacacactatatgccaaacaccacttacaaatattttaaatgtactaaaaactagtaatgcaaaggcagcaatgttagcaaaatttaaagagttatacggggtgagttttacagaattagtaagaccatttaaaagtaataaatcaacgtgttgcgattggtgtattgctgcatttggacttacacccagtatagctgacagtataaaaacactattacaacaatattgtttatatttacacattcaaagtttagcatgttcatggggaatggttgtgttactattagtaagatataaatgtggaaaaaatagagaaacaattgaaaaattgctgtctaaactattatgtgtgtctccaatgtgtatgatgatagagcctccaaaattgcgtagtacagcagcagcattatattggtataaaacaggtatatcaaatattagtgaagtgtatggagacacgccagaatggatacaaagacaaacagtattacaacatagttttaatgattgtacatttgaattatcacagatggtacaatgggcctacgataatgacatagtagacgatagtgaaattgcatataaatatgcacaattggcagacactaatagtaatgcaagtgcctttctaaaaagtaattcacaggcaaaaattgtaaaggattgtgcaacaatgtgtagacattataaacgagcagaaaaaaaacaaatgagtatgagtcaatggataaaatatagatgtgatagggtagatgatggaggtgattggaagcaaattgttatgtttttaaggtatcaaggtgtagagtttatgtcatttttaactgcattaaaaagatttttgcaaggcatacctaaaaaaaattgcatattactatatggtgcagctaacacaggtaaatcattatttggtatgagtttaatgaaatttctgcaagggtctgtaatatgttttgtaaattctaaaagccatttttggttacaaccattagcagatgccaaaataggtatgttagatgatgctacagtgccctgttggaactacatagatgacaatttaagaaatgcattggatggaaatttagtttctatggatgtaaagcatagaccattggtacaactaaaatgccctccattattaattacatctaacattaatgctggtacagattctaggtggccttatttacataatagattggtggtgtttacatttcctaatgagtttccatttgacgaaaacggaaatccagtgtatgagcttaatgataagaactggaaatcctttttctcaaggacgtggtccagattaagtttgcacgaggacgaggacaaggaaaacgatggagactctttgccaacgtttaaatgtgtgtcaggacaaaatactaacacattatgaaaatgatagtacagacctacgtgaccatatagactattggaaacacatgcgcctagaatgtgctatttattacaaggccagagaaatgggatttaaacatattaaccaccaggtggtgccaacactggctgtatcaaagaataaagcattacaagcaattgaactgcaactaacgttagaaacaatatataactcacaatatagtaatgaaaagtggacattacaagacgttagccttgaagtgtatttaactgcaccaacaggatgtataaaaaaacatggatatacagtggaagtgcagtttgatggagacatatgcaatacaatgcattatacaaactggacacatatatatatttgtgaagaaacatcagtaactgtggtagagggtcaagttgactattatggtttatattatgttcatgaaggaatacgaacatattttgtgcagtttaaagatgatgcagaaaaatatagtaaaaataaagtatgggaagttcatgcgggtggtcaggtaatattatgtcctacatctgtgtttagcagcaacgaagtatcctctcctgaaattattaggcagcacttggccaaccaccccgccgcgacccataccaaagccgtcgccttgggcaccgaagaaacacagacgactatccagcgaccaagatcagagccagacaccggaaacccctgccacaccactaagttgttgcacagagactcagtggacagtgctccaatcctcactgcatttaacagctcacacaaaggacggattaactgtaatagtaacactacacccatagtacatttaaaaggtgatgctaatactttaaaatgtttaagatatagatttaaaaagcattgtacattgtatactgcagtgtcgtctacatggcattggacaggacataatgtaaaacataaaagtgcaattgttacacttacatatgatagtgaatggcaacgtgaccaatttttgtctcaagttaaaataccaaaaactattacagtgtctactggatttatgtctatatgacaaatcttgatactgcatccacaacattactggcgtgctttttgctttgcttttgtgtgcttttgtgtgtctgcctattaatacgtccgctgcttttgtctgtgtctacatacacatcattaataatattggtattactattgtggataacagcagcctctgcgtttaggtgttttattgtatatattatatttgtttatataccattatttttaatacatacacatgcacgctttttaattacataatgtatatgtacataatgtaattgttacatataattgttgtataccataacttactattttttcttttttattttcatatataatttttttttttgtttgtttgtttgttttttaataaactgttatcacttaacaatgcgacacaaacgttctgcaaaacgcacaaaacgtgcatcggctacccaactttataaaacatgcaaacaggcaggtacatgtccacctgacattatacctaaggttgaaggcaaaactattgctgatcaaatattacaatatggaagtatgggtgtattttttggtgggttaggaattggaacagggtcgggtacgggcggacgcactgggtatattccattgggaacaaggcctcccacagctacagatacacttgctcctgtaagaccccctttaacagtagatcctgtgggcccttctgatccttctatagtttctttagtggaagaaactagttttattgatgctggtgcaccaacatctgtaccttccattcccccagatgtatcaggatttagtattactacttcaactgataccacacctgctatattagatattaataatactgttactactgttactacacataataatcccactttcactgacccatctgtattgcagcctccaacacctgcagaaactggagggcattttacactttcatcatccactattagtacacataattatgaagaaattcctatggatacatttattgttagcacaaaccctaacacagtaactagtagcacacccataccagggtctcgcccagtggcacgcctaggattatatagtcgcacaacacaacaagttaaagttgtagaccctgcttttgtaaccactcccactaaacttattacatatgataatcctgcatatgaaggtatagatgtggataatacattatatttttctagtaatgataatagtattaatatagctccagatcctgactttttggatatagttgctttacataggccagcattaacctctaggcgtactggcattaggtacagtagaattggtaataaacaaacactacgtactcgtagtggaaaatctataggtgctaaggtacattattattatgatttcagtactattgatcctgcagaagaaatagaattacaaactataacaccttctacatatactaccacttcacatgcagcctcacctacttctattaataatggattatatgatatttatgcagatgactttattacagatacttctacaaccccggtaccatctgtaccctctacatctttatcaggttatattcctgcaaatacaacaattccttttggtggtgcatacaatattcctttagtatcaggtcctgatatacccattaatataactgaccaagctccttcattaattcctatagttccagggtctccacaatatacaattattgctgatgcaggtgacttttatttacatcctagttattacatgttacgaaaacgacgtaaacgtttaccatattttttttcagatgtctctttggctgcctagtgaggccactgtctacttgcctcctgtcccagtatctaaggttgtaagcacggatgaatatgttgcacgcacaaacatatattatcatgcaggaacatccagactacttgcagttggacatccctattttcctattaaaaaacctaacaataacaaaatattagttcctaaagtatcaggattacaatacagggtatttagaatacatttacctgaccccaataagtttggttttcctgacacctcattttataatccagatacacagcggctggtttgggcctgtgtaggtgttgaggtaggtcgtggtcagccattaggtgtgggcattagtggccatcctttattaaataaattggatgacacagaaaatgctagtgcttatgcagcaaatgcaggtgtggataatagagaatgtatatctatggattacaaacaaacacaattgtgtttaattggttgcaaaccacctataggggaacactggggcaaaggatccccatgtaccaatgttgcagtaaatccaggggattgtccaccattagagttaataaacacagttattcaggatggtgatatggttgatactggctttggtgctatggactttactacattacaggctaacaaaagtgaagttccactggatatttgtacatctatttgcaaatatccagattatattaaaatggtgtcagaaccatatggcgacagcttatttttttatttacgaagggaacaaatgtttgttagacatttatttaatagggctggtgctgttggtgaaaatgtaccagacgatttatacattaaaggctctgggtctactgcaaatttagccagttcaaattattttcctacacctagtggttctatggttacctctgatgcccaaatattcaataaaccttattggttacaacgagcacagggccacaataatggcatttgttggggtaaccaactatttgttactgttgttgatactacacgcagtacaaatatgtcattatgtgctgccatatctacttcagaaactacatataaaaatactaactttaaggagtacctacgacatggggaggaatatgatttacagtttatttttcaactgtgcaaaataaccttaactgcagacgttatgacatacatacattctatgaattccactattttggaggactggaattttggtctacaacctcccccaggaggcacactagaagatacttataggtttgtaacatcccaggcaattgcttgtcaaaaacatacacctccagcacctaaagaagatccccttaaaaaatacactttttgggaagtaaatttaaaggaaaagttttctgcagacctagatcagtttcctttaggacgcaaatttttactacaagcaggattgaaggccaaaccaaaatttacattaggaaaacgaaaagctacacccaccacctcatctacctctacaactgctaaacgcaaaaaacgtaagctgtaagtattgtatgtatgttgaattagtgttgtttgttgtgtatatgtttgtatgtgcttgtatgtgcttgtaaatattaagttgtatgtgtgtttgtatgtatggtataataaacacgtgtgtatgtgtttttaaatgcttgtgtaactattgtgtcatgcaacataaataaacttattgtttcaacacctactaattgtgttgtggttattcattgtatataaactatatttgctacatcctgtttttgttttatatatactatattttgtagcgccagcggccattttgtagcttcaaccgaattcggttgcatgctttttggcacaaaatgtgtttttttaaatagttctatgtcagcaactatggtttaaacttgtacgtttcctgcttgccatgcgtgccaaatccctgttttcctgacctgcactgcttgccaaccattccattgttttttacactgcactatgtgcaactactgaatcactatgtacattgtgtcatataaaataaatcactatgcgccaacgccttacataccgctgttaggcacatatttttggcttgttttaactaacctaattgcatatttggcataaggtttaaacttctaaggccaactaaatgtcaccctagttcatacatgaactgtgtaaaggttagtcatacattgttcatttgtaaaactgcacatgggtgtgtgcaaaccgttttgggttacacatttacaagcaacttatataataatactaaactacaataattcatgtataaaactaagggcgtaaccgaaatcggttgaaccgaaaccggttagtataaaagcagacattttatgcaccaaaagagaactgcaatgtttcaggacccacaggagcgacccagaaagttaccacagttatgcacagagctgcaaacaactatacatgatataatattagaatgtgtgtactgcaagcaacagttactgcgacgtgaggtatatgactttgcttttcgggatttatgcatagtatatagagatgggaatccatatgctgtatgtgataaatgtttaaagttttattctaaaattagtgagtatagacattattgttatagtttgtatggaacaacattagaacagcaatacaacaaaccgttgtgtgatttgttaattaggtgtattaactgtcaaaagccactgtgtcctgaagaaaagcaaagacatctggacaaaaagcaaagattccataatataaggggtcggtggaccggtcgatgtatgtcttgttgcagatcatcaagaacacgtagagaaacccagctgtaatcatgcatggagatacacctacattgcatgaatatatgttagatttgcaaccagagacaactgatctctactgttatgagcaattaaatgacagctcagaggaggaggatgaaatagatggtccagctggacaagcagaaccggacagagcccattacaatattgtaaccttttgttgcaagtgtgactctacgcttcggttgtgcgtacaaagcacacacgtagacattcgtactttggaagacctgttaatgggcacactaggaattgtgtgccccatctgttctcagaaaccataatctacc

SEQ ID NO: 6 - DNA, 7906 bp, Homo sapiens
  source 1..7906: mol_type = genomic DNA
atggctgatcctgcaggtaccaatggggaagagggtacgggatgtaatggatggttttatgtagaggctgtagtggaaaaaaaaacaggggatgctatatcagatgacgagaacgaaaatgacagtgatacaggtgaagatttggtagattttatagtaaatgataatgattatttaacacaggcagaaacagagacagcacatgcgttgtttactgcacaggaagcaaaacaacatagagatgcagtacaggttctaaaacgaaagtatttgggtagtccacttagtgatattagtggatgtgtagacaataatattagtcctagattaaaagctatatgtatagaaaaacaaagtagagctgcaaaaaggagattatttgaaagcgaagacagcgggtatggcaatactgaagtggaaactcagcagatgttacaggtagaagggcgccatgagactgaaacaccatgtagtcagtatagtggtggaagtgggggtggttgcagtcagtacagtagtggaagtgggggagagggtgttagtgaaagacacactatatgccaaacaccacttacaaatattttaaatgtactaaaaactagtaatgcaaaggcagcaatgttagcaaaatttaaagagttatacggggtgagttttacagaattagtaagaccatttaaaagtaataaatcaacgtgttgcgattggtgtattgctgcatttggacttacacccagtatagctgacagtataaaaacactattacaacaatattgtttatatttacacattcaaagtttagcatgttcatggggaatggttgtgttactattagtaagatataaatgtggaaaaaatagagaaacaattgaaaaattgctgtctaaactattatgtgtgtctccaatgtgtatgatgatagagcctccaaaattgcgtagtacagcagcagcattatattggtataaaacaggtatatcaaatattagtgaagtgtatggagacacgccagaatggatacaaagacaaacagtattacaacatagttttaatgattgtacatttgaattatcacagatggtacaatgggcctacgataatgacatagtagacgatagtgaaattgcatataaatatgcacaattggcagacactaatagtaatgcaagtgcctttctaaaaagtaattcacaggcaaaaattgtaaaggattgtgcaacaatgtgtagacattataaacgagcagaaaaaaaacaaatgagtatgagtcaatggataaaatatagatgtgatagggtagatgatggaggtgattggaagcaaattgttatgtttttaaggtatcaaggtgtagagtttatgtcatttttaactgcattaaaaagatttttgcaaggcatacctaaaaaaaattgcatattactatatggtgcagctaacacaggtaaatcattatttggtatgagtttaatgaaatttctgcaagggtctgtaatatgttttgtaaattctaaaagccatttttggttacaaccattagcagatgccaaaataggtatgttagatgatgctacagtgccctgttggaactatatagatgacaatttaagaaatgcattggatggaaatttagtttctatggatgtaaagcatagaccattggtacaactaaaatgccctccattattaattacatctaacattaatgctggtacagattctaggtggccttatttacataatagattggtggtgtttacatttcctaatgagtttccatttgacgaaaacggaaatccagtgtatgagcttaatgataagaactggaaatcctttttctcaaggacgtggtccagattaagtttgcacgaggacgaggacaaggaaaacgatggagactctttgccaacgtttaaatgtgtgtcaggacaaaatactaacacattatgaaaatgatagtacagacctacgtgaccatatagactattggaaacacatgcgcctagaatgtgctatttattacaaggccagagaaatgggatttaaacatattaaccaccaggtggtgccaacgctggctatatcaaagaataaagcattacaagcaattgaactgcaactaacgttagaaacaatatataactcacaatatagtaatgaaaagtggacattacaagacgttagccttgaagtgtatttaactgcaccaacaggatgtataaaaaaacatggatatacagtggaagtgcagtttgatggagacatatgcaatacaatgcattatacaaactggacacatatatatatttgtgaagaagcatcagtaactgtggtagagggtcaagttgactattatggtttatattatgttcatgaaggaatacgaacatattttgtgcagtttaaagatgatgcagaaaaatatagtaaaaataaagtatgggaagttcatgcgggtggtcaggtaatattatgtcctacatctgtgtttagcagcaacgaagtatcctctcctgaaattattaggcagcacttggccaaccactccgccgcgacccataccaaagccgtcgccttgggcaccgaagaaacacagacgactatccagcgaccaagatcagagccagacaccggaaacccctgccacaccactaagttgttgcacagagactcagtggacagtgctccaatcctcactgcatttaacagctcacacaaaggacggattaactgtaatagtaacactacacccatagtacatttaaaaggtgatgctaatactttaaaatgtttaagatatagatttaaaaagcattgtaaattgtatactgcagtgtcgtctacatggcattggacaggacataatgtaaaacataaaagtgcaattgttacacttacatatgatagtgaatggcaacgtgaccaatttttgtctcaagttaaaataccaaaaactattacagtgtctactggatttatgtctatatgacaaatcttgatactgcatccacaacattactggcgtgctttttgctttgcttttgtgtgcttttgtgtgtctgcctattaatacgtccgctgcttttgtctgtgtctacatacacatcattaatactattggtattactattgtggataacagcagcctctgcgtttaggtgttttattgtatatattgtatttgtttatataccattatttttaatacatacacatgcacgctttttaattacataatgtatatgtacataatgtaattgttacatataattgttgtataccataacttactattttttcttttttatttttatatataatttttttttttgtttgtttgtttgttttttaataaactgttatcacttaacaatgcgacacaaacgttctgcaaaacgcacaaaacgtgcatcggctacccaactttataaaacatgcaaacaggcaggtacatgtccacctgacattatacctaaggttgaaggcaaaactattgctgatcaaatattacaatatggaagtatgggtgtattttttggtgggttaggaattggaacagggtcgggtacaggcggacgcactgggtatattccattgggaacaaggcctcccacagctacagatacacttgctcctgtaagaccccctttaacagtagatcctgtgggcccttctgatccttctatagtttctttagtggaagaaactagttttattgatgctggtgcaccaacatctgtaccttccattcccccagatgtatcaggatttagtattactacttcaactgataccacacctgctatattagatattaataatactgttactactgttactacacataataatcccactttcactgacccatctgtattgcagcctccaacacctgcagaaactggagggcattttacactttcatcatccactattagtacacataattatgaagaaattcctatggatacatttattgttagcacaaaccctaacacagtaactagtagcacacccataccagggtctcgcccagtggcacgcctaggattatatagtcgcacaacacaacaagttaaagttgtagaccctgcttttgtaaccactcccactaaacttattacatatgataatcctgcatatgaaggtatagatgtggataatacattatattttcctagtaatgataatagtattaatatagctccagatcctgactttttggatatagttgctttacataggccagcattaacctctaggcgtactggcattaggtacagtagaattggtaataaacaaacactacgtactcgtagtggaaaatctataggtgctaaggtacattattattatgatttgagtactattgatcctgcagaagaaatagaattacaaactataacaccttctacatatactaccacttcacatgcagcctcacctacttctattaataatggattatatgatatttatgcagatgactttattacagatacttctacaaccccggtaccatctgtaccctctacatctttatcaggttatattcctgcaaatacaacaattccttttggtggtgcatacaatattcctttagtatcaggtcctgatatacccattaatataactgaccaagctccttcattaattcctatagttccagggtctccacaatatacaattattgctgatgcaggtgacttttatttacatcctagttattacatgttacgaaaacgacgtaaacgtttaccatattttttttcagatgtctctttggctgcctagtgaggccactgtctacttgcctcctgtcccagtatctaaggttgtaagcacggatgaatatgttgcacgcacaaacatatattatcatgcaggaacatccagactacttgcagttggacatccctattttcctattaaaaaacctaacaataacaaaatattagttcctaaagtatcaggattacaatacagggtatttagaatacatttacctgaccccaataagtttggttttcctgacacctcattttataatccagatacacagcggctggtttgggcctgtgtaggtgttgaggtaggtcgtggtcagccattaggtgtgggcattagtggccatcctttattaaataaattggatgacacagaaaatgctagtgcttatgcagcaaatgcaggtgtggataatagagaatgtatatctatggattacaaacaaacacaattgtgtttaattggttgcaaaccacctataggggaacactggggcaaaggatccccatgtaccaatgttgcagtaaatccaggtgattgtccaccattagagttaataaacacagttattcaggatggtgatatggttgatactggctttggtgctatggactttactacattacaggctaacaaaagtgaagttccactggatatttgtacatctatttgcaaatatccagattatattaaaatggtgtcagaaccatatggcgacagcttatttttttatttacgaagggaacaaatgtttgttagacatttatttaatagggctggtgctgttggtgaaaatgtaccagacgatttatacattaaaggctctgggtctactgcaaatttagccagttcaaattattttcctacacctagtggttctatggttacctctgatgcccaaatattcaataaaccttattggttacaacgagcacagggccacaataatggcatttgttggggtaaccaactatttgttactgttgttgatactacacgcagtacaaatatgtcattatgtgctgccatatctacttcagaaactacatataaaaatactaactttaaggagtacctacgacatggggaggaatatgatttacagtttatttttcaactgtgcaaaataaccttaactgcagacgttatgacatacatacattctatgaattccactattttggaggactggaattttggtctacaacctcccccaggaggcacactagaagatacttataggtttgtaacatcccaggcaattgcttgtcaaaaacatacacctccagcacctaaagaagatccccttaaaaaatacactttttgggaagtaaatttaaaggaaaagttttctgcagacctagatcagtttcctttaggacgcaaatttttactacaagcaggattgaaggccaaaccaaaatttacattaggaaaacgaaaagctacacccaccacctcatctacctctacaactgctaaacgcaaaaaacgtaagctgtaagtattgtatgtatgttgaattagtgttgtttgttgtgtatatgtttgtatgtgcttgtatgtgcttgtaaatattaagttgtatgtgtgtttgtatgtatggtataataaacacgtgtgtatgtgtttttaaatgcttgtgtaactattgtgtcatgcaacataaataaacttattgtttcaacacctactaattgtgttgtggttattcattgtatataaactatatttgctacatcctgtttttgttttatatatactatattttgtagcgccagcggccattttgtagcttcaaccgaattcggttgcatgctttttggcacaaaatgtgtttttttaaatagttctatgtcagcaactatagtttaaacttgtacgtttcctgcttgccatgcgtgccaaatccctgttttcctgacctgcactgcttgccaaccattccattgttttttacactgcactatgtgcaactactgaatcactatgtacattgtgtcatataaaataaatcactatgcgccaacgccttacataccgctgttaggcacatatttttggcttgttttaactaacctaattgcatatttggcataaggtttaaacttctaaggccaactaaatgtcaccctagttcatacatgaactgtgtaaaggttagtcatacattgttcatttgtaaaactgcacatgggtgtgtgcaaaccgttttgggttacacatttacaagcaacttatataataatactaaactacaataattcatgtataaaactaagggcgtaaccgaaatcggttgaaccgaaaccggttagtataaaagcagacattttatgcaccaaaagagaactgcaatgtttcaggacccacaggagcgacccagaaagttaccacagttatgcacagagctgcaaacaactatacatgatataatattagaatgtgtgtactgcaagcaacagttactgcgacgtgaggtatatgactttgcttttcgggatttatgcatagtatatagagatgggaatccatatgctgtatgtgataaatgtttaaagttttattctaaaattagtgagtatagacattattgttatagtttgtatggaacaacattagaacagcaatacaacaaaccgttgtgtgatttgttaattaggtgtattaactgtcaaaagccactgtgtcctgaagaaaagcaaagacatctgaacaaaaagcaaagattccataatataaggggtcggtggaccggtcgatgtatgtcttgttgcagatcatcaagaacacgtagagaaacccagctgtaatcatgcatggagatacacctacattgcatgaatatatgttagatttgcaaccagagacaactgatctctactgttatgagcaattaaatgacagctcagaggaggaggatgaaatagatggtccagctggacaagcagaaccggacagagcccattacaatattgtaaccttttgttgcaagtgtgactctacgcttcggttgtgcgtacaaagcacacacgtagacattcgtactttggaagacctgttaatgggcacactaggaattgtgtgccccatctgttctcagaaaccataatctacc

SEQ ID NO: 7 - DNA, 7906 bp, Homo sapiens
  source 1..7906: mol_type = genomic DNA; note = UNCseq1525
atggctgatcctgcaggtaccaatggggaagagggtacgggatgtaatggatggttttatgtagaggctgtagtggaaaaaaaaacaggggatgctatatcagatgacgagaacgaaaatgacagtgatacaggtgaagatttggtagattttatagtaaatgataatgattatttaacacaggcagaaacagagacagcacatgcgttgtttactgcacaggaagcaaaacaacatagagatgcagtacaggttctaaaacgaaagtatttgggtagtccacttagtgatattagtggatgtgtagacaataatattagtcctagattaaaagctatatgtatagaaaaacaaagtagagctgcaaaaaggagattatttgaaagcgaagacagtgggtatggcaatactgaagtggaaactcagcagatgttacaggtagaagggcgccatgagactgaaacaccatgtagtcagtatagtggtggaagtgggggtggttgcagtcagtacagtagtggaagtgggggagagggtgttagtgaaagacacaatatatgccaaacaccacttacaaatattttaaatgtactaaaaactagtaatgcaaaggcagcaatgttagcaaaatttaaagagttatacggggtgagttttacagaattagtaagaccatttaaaagtaataaatcaacgtgttgcgattggtgtattgctgcatttggacttacacccagtatagctgacagtataaaaacactattacaacaatattgtttatatttacacattcaaagtttagcatgttcatggggaatggttgtgttactattagtaagatataaatgtggaaaaaatagagaaacaattgaaaaattgctgtctaaactattatgtgtgtctccaatgtgtatgatgatagagcctccaaaattgcgtagtacagcagcagcattatattggtataaaacaggtatatcaaatattagtgaagtgtatggagacacgccagaatggatacaaagacaaacagtattacaacatagttttaatgattgtacatttgaattatcacagatggtacaatgggcctacgataatgacatagtagacgatagtgaaattgcatataaatatgcacaattggcagacactaatagtaatgcaagtgcctttctaaaaagtaattcacaggcaaaaattgtaaaggattgtgcaacaatgtgtagacattataaacgagcagaaaaaaaacaaatgagtatgagtcaatggataaaatatagatgtgatagggtagatgatggaggtgattggaagcaaattgttatgtttttaaggtatcaaggtgtagagtttatgtcatttttaactgcattaaaaagatttttgcaaggcatacctaaaaaaaattgcatattactatatggtgcagctaacacaggtaaatcattatttggtatgagtttaatgaaatttctgcaagggtctgtaatatgttttgtaaattctaaaagccatttttggttacaaccattagcagatgccaaaataggtatgttagatgatgctacagtgccctgttggaactatatagatgacaatttaagaaatgcattggatggaaatttagtttctatggatgtaaagcatagaccattggtacaactaaaatgccctccattattaattacatctaacattaatgctggtacagattctaggtggccttatttacataatagattggtggtgtttacatttcctaatgagtttccatttgacgaaaacggaaatccagtgtatgagcttaatgataagaactggaaatcctttttctcaaggacgtggtccagattaagtttgcacgaggacgaggacaaggaaaacgatggagactctttgccaacgtttaaatgtgtgtcaggacaaaatactaacacattatgaaaatgatagtacagacctacgtgaccatatagactattggaaacacatgcgcctagaatgtgctatttattacaaggccagagaaatgggatttaaacatattaaccaccaggtggtgccaacgctggctgtatcaaagaataaagcattacaagcaattgaactgcaactaacgttagaaacaatatataactcacaatatagtaatgaaaagtggacattacaagacgttagccttgaagtgtatttaactgcaccaacaggatgtataaaaaaacatggatatacagtggaagtgcagtttgatggagacatatgcaatacaatgcattatacaaactggacacatatatatatttgtgaagaagcatcagtaactgtggtagagggtcaagttgactattatggtttatattatgttcatgaaggaatacgaacatattttgtgcagtttaaagatgatgcagaaaaatatagtaaaaataaagtatgggaagttcatgcgggtggtcaggtaatattatgtcctacatctgtgtttagcagcaacgaagtatcctctcctgaaactattaggcagcacttggccaaccactccgccgcgacccataccaaagccgtcgccttgggcaccgaagaaacacagacgactatccagcgaccaagatcagagccagacaccggaaacccctgccacaccactaagttgttgcacagagactcagtggacagtgctccaatcctcactgcatttaacagctcacacaaaggacggattaactgtaatagtaacactacacccatagtacatttaaaaggtgatgctaatactttaaaatgtttaagatatagatttaaaaagcattgtaaattgtatactgcagtgtcgtctacatggcattggacaggacataatgtaaaacataaaagtgcaattgttacacttacatatgatagtgaatggcaacgtgaccaatttttgtctcaagttaaaataccaaaaactattacagtgtctactggatttatgtctatatgacaaatcttgatactgcatacacaacattactggcgtgctttttgctttgcttttgtgtgcttttgtgtgtctgcctattaatacgtccgctgcttttgtctgtgtctacatacacatcattaatactattggtattactattgtggataacagcagcctctgcgtttaggtgttttattgtatatattgtatttgtttatataccattatttttaatacatacacatgcacgctttttaattacataatgtatatgtacataatgtaattgttacatataattgttgtataccataacttactattttttcttttttatttttatatataatttttttttttgtttgtttgtttgttttttaataaactgttatcacttaacaatgcgacacaaacgttctgcaaaacgcacaaaacgtgcatcggctacccaactttataaaacatgcaaacaggcaggtacatgtccacctgacattatacctaaggttgaaggcaaaactattgctgatcaaatattacaatatggaagtatgggtgtattttttggtgggttaggaattggaacagggtcgggtacaggcggacgcactgggtatattccattgggaacaaggcctcccacagctacagatacacttgctcctgtaagaccccctttaacagtagatcctgtgggcccttctgatccttctatagtttctttagtggaagaaactagttttattgatgctggtgcaccaacatctgtaccttccatccccccagatgtatcaggatttagtattactacttcaactgataccacacctgctatattagatattaataatactgttactactgttactacacataataatcccactttcactgacccatctgtattgcagcctccaacacctgcagaaactggagggcattttacactttcatcatccactattagtacacataattatgaagaaattcctatggatacatttattgttagcacaaaccctaacacagtaactagtagcacacccataccagggtctcgcccagtggcacgcctaggattatatagtcgcacaacacaacaagttaaagttgtagaccctgcttttgtaaccactcccactaaacttattacatatgataatcctgcatatgaaggtatagatgtggataatacattatattttcctagtaatgataatagtattaatatagctccagatcctgactttttggatatagttgctttacataggccagcattaacctctaggcgtactggcattaggtacagtagaattggtaataaacaaacactacgtactcgtagtggaaaatctataggtgctaaggtacattattattatgatttgagtactattgatcctgcagaagaaatagaattacaaactataacaccttctacatatactaccactttacatgcagcctcacctacttctattaataatggattatatgatatttatgcagatgactttattacagatacttttacaaccccggtaccatctgtaccctctacatctttatcaggttatattcctgcaaatacaacaattccttttggtggtgcatacaatattcctttagtatcaggtcctgatatacccattaatataactgaccaagctccttcattaattcctatagttccagggtctccacaatatacaattattgctgatgcaggtgacttttatttacatcctagttattacatgttacgaaaacgacgtaaacgtttaccatattttttttcagatgtctctttggctgcctagtgaggccactgtctacttgcctcctgtcccagtatctaaggttgtaagcacggatgaatatgttgcacgcacaaacatatattatcatgcaggaacatccagactacttgcagttggacatccctattttcctattaaaaaacctaacaataacaaaatattagttcctaaagtatcaggattacaatacagggtatttagaatacatttacctgaccccaataagtttggttttcctgacacctcattttataatccagatacacagcggctggtttgggcctgtgtaggtgttgaggtaggtcgtggtcagccattaggtgtgggcattagtggccatcctttattaaataaattggatgacacagaaaatgctagtgcttatgcagcaaatgcaggtgtggataatagagaatgtatatctatggattacaaacaaacacaattgtgtttaattggttgcaaaccacctataggggaacactggggcaaaggatccccatgtaccaatgttgcagtaaatccaggtgattgtccaccattagagttaataaacacagttattcaggatggtgatatggttgatactggctttggtgctatggactttactacattacaggctaacaaaagtgaagttccactggatatttgtacatctatttgcaaatatccagattatattaaaatggtgtcagaaccatatggcgacagcttatttttttatttacgaagggaacaaatgtttgttagacatttatttaatagggctggtgctgttggtgaaaatgtaccagacgatttatacattaaaggctctgggtctactgcaaatttagccagttcaaattattttcctacacctagtggttctatggttacctctgatgcccaaatattcaataaaccttattggttacaacgagcacagggccacaataatggcatttgttggggtaaccaactatttgttactgttgttgatactacacgcagtacaaatatgtcattatgtgctgccatatctacttcagaaactacatataaaaatactaactttaaggagtacctacgacatggggaggaatatgatttacagtttatttttcaactgtgcaaaataaccttaactgcagacgttatgacatacatacattctatgaattccactattttggaggactggaattttggtctacaaccccccccaggaggcacactagaagatacttataggtttgtaacatcccaggcaattgcttgtcaaaaacatacacctccagcacctaaagaagatccccttaaaaaatacactttttgggaagtaaatttaaaggaaaagttttctgcagacctagatcagtttcctttaggacgcaaatttttactacaagcaggattgaaggccaaaccaaaatttacattagggaaacgaaaagctacacccaccacctcatctacctctacaactgctaaacgcaaaaaacgtaagctgtaagtattgtatgtatgttgaattagtgttgtttgttgtttatatgtttgtatgtgcttgtatgtgcttgtaaatattaagttgtatgtgtgtttgtatgtatggtataataaacacgtgtgtatgtgtttttaaatgcttgtgtaactattgtgtgatgcaacataaataaacttattgtttcaacacctactaattgtgttgtggttattcattgtatataaactatatttgctacaatctgtttttgttttatatatactatattttgtagcgccagcggccattttgtagcttcaaccgaattcggttgcatgctttttggcacaaaatgtgtttttttaaatagttctatgtcagcaactatagtttaaacttgtacgtttcctgcttgccatgcgtgccaaatccctgttttcctgacctgcactgcttgccaaccattccattgttttttacactgcactatgtgcaactactgaatcactatgtacattgtgtcatataaaataaatcactatgcgccaacgccttacataccgctgttaggcacatatttttggcttgttttaactaacctaattgcatatttggcataaggtttaaacttctaaggccaactaaatgtcaccctagttcatacatgaactgtgtaaaggttagtcatacattgttcatttgtaaaactgcacatgggtgtgtgcaaaccgttttgggttacacatttacaagcaacttatataataatactaaactacaataatccatgtataaaactaagggcgtaaccgaaatcggttgaaccgaaaccggttagtataaaagcagacattttatgcaccaaaagagaactgcaatgtttcaggacccacaggagcgacccggaaagttaccacagttatgcacagagctgcaaacaactatacatgatataatattagaatgtgtgtactgcaagcaacagttactgcgacgtgaggtatatgactttgcttttcgggatttatgcatagtatatagagatgggaatccatatgctgtatgtgataaatgtttaaagttttattctaaaattagtgagtatagacattattgttatagtgtgtatggaacaacattagaacagcaatacaacaaaccgttgtgtgatttgttaattaggtgtattaactgtcaaaagccactgtgtcctgaagaaaagcaaagacatctggacaaaaagcaaagattgcataatataaggggtcggtggaccggtcgatgtatgtcttgttgcagatcatcaagaacacgtagagaaacccagctgtaatcatgcatggagatacacctacattgcatgaatatatgttagatttgcaaccagagacaactgatctctactgttatgagcaattaaatgacagctcagaggaggaggatgaaatagatggtccagctggacaagcagaaccggacagagaacattacaatattgtaaccttttgttgcaagtgtgactctacgcttcggttgtgcgtacaaagcacacacgtagacattcgtactttggaagacctgttaatgggcacactaggaattgtgtgccccatctgttctcagaaaccataatctacc

SEQ ID NO: 8 - DNA, 7906 bp, Homo sapiens
  source 1..7906: mol_type = genomic DNA; note = UNCseq1527
atggctgatcctgcaggtaccaatggggaagagggtacgggatgtaatggatggttttatgtagaggctgtagtggaaaaaaaaacaggggatgctatatcagatgacgagaacgaaaatgacagtgatacaggtgaagatttggtagattttatagtaaatgataatgattatttaacacaggcagaaacagagacagcacatgcgttgtttactgcacaggaagcaaaacaacatagagatgcagtacaggttctaaaacgaaagtatttgggtagtccacttagtgatattagtggatgtgtagacaataatattagtcctagattaaaagctatatgtatagaaaaacaaagtagagctgcaaaaaggagattatttgaaagcgaagacagcgggtatggcaatactgaagtggaaactcagcagatgttacaggtagaagggcgccatgagactgaaacaccatgtagtcagtatagtggtggaagtgggggtggttgcagtcagtacagtagtggaagtgggggagagggtgttagtgaaagacacactatatgccaaacaccacttacaaatattttaaatgtactaaaaactagtaatgcaaaggcagcaatgttagcaaaatttaaagagttatacggggtgagtttttcagaattagtaagaccatttaaaagtaataaatcaacgtgttgcgattggtgtattgctgcatttggacttacacccagtatagctgacagtataaaaacactattacaacaatattgtttatatttacacattcaaagtttagcatgttcatggggaatggttgtgttactattagtaagatataaatgtggaaaaaatagagaaacaattgaaaaattgctgtctaaactattatgtgtgtctccaatgtgtatgatgatagagcctccaaaattgcgtagtacagcagcagcattatattggtataaaacaggtatatcaaatattagtgaagtgtatggagacacgccagaatggatacaaagacaaacagtattacaacatagttttaatgattgtacatttgaattatcacagatggtacaatgggcctacgataatgacatagtagacgatagtgaaattgcatataaatatgcacaattggcagacactaatagtaatgcaagtgcctttctaaaaagtaattcacaggcaaaaattgtaaaggattgtgcaacaatgtgtagacattataaacgagcagaaaaaaaacaaatgagtatgagtcaatggataaaatatagatgtgatagggtagatgatggaggtgattggaagcaaattgttatgtttttaaggtatcaaggtgtagagtttatgtcatttttaactgcattaaaaagatttttgcaaggcatacctaaaaaaaattgcatattactatatggtgcagctaacacaggtaaatcattatttggtatgagtttaatgaaatttctgcaagggtctgtaatatgttttgtaaattctaaaagccatttttggttacaaccattagcagatgccaaaataggtatgttagatgatgctacagtgccctgttggaactacatagatgacaatttaagaaatgcattggatggaaatttagtttctatggatgtaaagcatagaccattggtacaactaaaatgccctccattattaattacatctaacattaatgctggtacagattctaggtggccttatttacataatagattggtggtgtttacatttcctaatgagtttccatttgacgaaaacggaaatccagtgtatgagcttaatgataagaactggaaatcctttttctcaaggacgtggtccagattaagtttgcacgaggacgaggacaaggaaaacgatggagactctttgccaacgtttaaatgtgtgtcaggacaaaatactaacacattatgaaaatgatagtacagacctacgtgaccatatagactattggaaacacatgcgcctagaatgtgctatttattacaaggccagagaaatgggatttaaacatattaaccaccaggtggtgccaacactggctgtatcaaagaataaagcattacaagcaattgaactgcaactaacgttagaaacaatatataactcacaatatagtaatgaaaagtggacattacaagacgttagccttgaagtgtatttaactgcaccaacaggatgtataaaaaaacatggatatacagtggaagtgcagtttgatggagacatatgcaatacaatgcattatacaaactggacacatatatatatttgtgaagaagcatcagtaactgtggtagagggtcaagttgactattatggtttatattatgttcatgaaggaatacgaacatattttgtgcagtttaaagatgatgcagaaaaatatagtaaaaataaagtatgggaagttcatgcgggtggtcaggtaatattatgtcctacatctgtgtttagcagcaacgaagtatcctctcctaaaattattaggcagcacttggccaaccactccgccgcgacccataccaaagccgtcgccttgggcaccgaagaaacacagacgactatccagcgaccaagatcagagccagacaccggaaacccctgccacaccactaagttgttgcacagagactcagtggacagtgctccaatcctcactgcatttaacagctcacacaaaggacggattaactgtaatagtaacactacacccatagtacatttaaaaggtgatgctaatactttaaaatgtttaagatatagatttaaaaagcattgtacattgtatactgcagtgtcgtctacatggcattggacaggacataatgtaaaacataaaagtgcaattgttacacttacatatgatagtgaatggcaacgtgaccaatttttgtctcaagttaaaataccaaaaactattacagtgtctactggatttatgtctatatgacaaatcttgatactgcatccacaacattactggcgtgctttttgctttgcttttgtgtgcttttgtgtgtctgcctattaatacgtccgctgcttttgtctgtgtctacatacacatcattaatactattggtattactattgtggataacagcagcctctgcgtttaggtgttttattgtatatattgtatttgtttatataccattatttttaatacatacacatgcacgctttttaattacataatgtatatgtacaaaatgtaattgttacatataattgttgtataccataacttactattttttcttttttattttcatatatattttttttttttgtttgtttgtttgttttttaataaactgttatcactgaacaatgcgacacaaacgttctgcaaaacgcacaaaacgtgcatcggctacccaactttataaaacatgcaaacaggcaggtacatgtccacctgacattatacctaaggttgaaggcaaaactattgctgatcaaatattacaatatggaagtatgggtgtattttttggtgggttaggaattggaacagggtcgggtacaggcggacgcactgggtatattccattgggaacaaggcctcccacagctacagatacacttgctcctgtaagaccccctttaacagtagatcctgtgggcccttctgatccttctatagtttctttagtggaagaaactagttttattgatgctggtgcaccaacatctgtaccttccattcccccagatgtatcaggatttagtattactacttcaactgataccacacctgctatattagatattaataatactgttactactgttactacacataataatcccactttcactgacccatctgtattgcagcctccaacacctgcagaaactggagggcattttacactttcatcatccactattagtacacataattatgaagaaattcctatggatacatttattgttagcacaaaccctaacacagtaactagtagcacacccataccagggtctcgcccagtggcacgcctaggattatatagtcgcacaacacaacaagttaaagttgtagaccctgcttttgtaaccactcccactaaacttattacatatgataatcctgcatatgaaggtatagatgtggataatacattatatttttctagtaatgataatagtattaatatagctccagatcctgactttttggatatagttgctttacataggccagcattaacctctaggcgtactggcattaggtacagtagaattggtaataaacaaacactacgtactcgtagtggaaaatctataggtgctaaggtacattattattatgatttaagtactattgatcctgcagaagaaatagaattacaaactataacaccttctacatatactaccacttcacatgcagcctcacctacttctattaataatggattatatgatatttatgcagatgactttattacagatacttctacaaccccggtaccatctgtaccctctacatctttatcaggttatattcctgcaaatacaacaattccttttggtggtgcatacaatattcctttagtatcaggtcctgatatacccattaatataactgaccaagctccttcattaattcctatagttccagggtctccacaatatacaattattgctgatgcaggtgacttttatttacatcctagttattacatgttacgaaaacgacgtaaacgtttaccatattttttttcagatgtctctttggctgcctagtgaggccactgtctacttgcctcctgtcccagtatctaaggttgtaagcacggatgaatatgttgcacgcacaaacatatattatcatgcaggaacatccagactacttgcagttggacatccctattttcctattaaaaaacctaacaataacaaaatattagttcctaaagtatcaggattacaatacagggtatttagaatacatttacctgaccccaataagtttggttttcctgacacctcattttataatccagatacacagcggctggtttgggcctgtgtaggtgttgaggtaggtcgtggtcagccattaggtgtgggcattagtggccatcctttattaaataaattggatgacacagaaaatgctagtgcttatgcagcaaatgcaggtgtggataatagagaatgtatatctatggattacaaacaaacacaattgtgtttaattggttgcaaaccacctataggggaacactggggcaaaggatccccatgtaccaatgttgcagtaaatccaggtgattgtccaccattagagttaataaacacagttattcaggatggtgatatggttgatactggctttggtgctatggactttactacattacaggctaacaaaagtgaagttccactggatatttgtacatctatttgcaaatatccagattatattaaaatggtgtcagaaccatatggcgacagcttatttttttatttacgaagggaacaaatgtttgttagacatttatttaatagggctggtgctgttggtgaaaatgtaccagacgatttatacattaaaggctctgggtctactgcaaatttagccagttcaaattattttcctacacctagtggttctatggttacctctgatgcccaaatattcaataaaccttattggttacaacgagcacagggccacaataatggcatttgttggggtaaccaactatttgttactgttgttgatactacacgcagtacaaatatgtcattatgtgctgccatatctacttcagaaactacatataaaaatactaactttaaggagtacctacgacatggggaggaatatgatttacagtttatttttcaactgtgcaaaataaccttaactgcagacgttatgacatacatacattctatgaattccactattttggaggactggaattttggtctacaacctcccccaggaggcacactagaagatacttataggtttgtaacatcccaggcaattgcttgtcaaaaacatacacctccagcacctaaagaagatccccttaaaaaatacactttttgggaagtaaatttaaaggaaaagttttctgcagacctagatgagtttcctttaggacgcaaatttttactacaagcaggattgaaggccaaaccaaaatttacattaggaaaacgaaaagctacacccaccacctcatctacctctacaactgctaaacgcaaaaaacgtaagctgtaagtattgtatgtatgttgaattagtgttgtttgttgtttatatgtttgtatgtgcttgtatgtgcttgtaaatattaagttgtatgtgtgtttgtatgtatggtataataaacacgtgtgtatgtgtttttaaatgcttgtgtaactattgtgtcatgcaacataaataaacttattgtttcaacacctactaattgtgttgtggttattcattgtatataaactatatttgctacatcctgtttttgttttatatatactatattttgtagcgccagcggccattttgtagcttcaaccgaattcggttgcatgctttttggcacaaaatgtgtttttttaaatagttctatgtcagcaactatagtttaaacttgtacgtttcctgcttgccatgcgtgccaaatccctgttttcctgacctgcactgcttgccaaccattccattgttttttacactgcactatgtgcaactactgaatcactatgtacattgtgtcatataaaataaatcactatgcgccaacgccttacataccgctgttaggcacatatttttggcttgttttaactaacctaattgcatatttggcataaggtttaaacttctaaggccaactaaatgtcaccctagttcatacatgaactgtgtaaaggttagtcatacattgttcatttgtaaaactgcacatgggtgtgtgcaaaccgttttgggttacacatttacaagcaacttatataataatactaaactacaataatttatgtataaaactaagggcgtaaccgaaatcggttgaaccgaaaccggttagtataaaagcagacattttatgcaccaaaagagaactgcaatgtttcaggacccacaggagcgacccagaaagttaccacagttatgcacagagctgcaaacaactatacatgatataatattagaatgtgtgtactgcaagcaacagttactgcgacgtgaggtatatgactttgcttttcgggatttatgcatagtatatagagatgggaatccatatgctgtatgtgataaatgtttaaagttttattctaaaattagtgagtatagacattattgttatagtgtgtatggaacaacattagaacagcaatacaacaaaccgttgtgtgatttgttaattaggtgtattaactgtcaaaagccactgtgtcctgaagaaaagcaaagacatctggacaaaaagcaaagattccataatataaggggtcggtggaccggtcgatgtatgtcttgttgcagatcatcaagaacacgtagagaaacccagctgtaatcatgcatggagatacacctacattgcatgaatatatgttagatttgcaaccagagacaactgatctctactgttatgagcaattaaatgacagctcagaggaggaggatgaaatagatggtccagctggacaagcagaaccggacagagcccattacaatattgtaaccttttgttgcaagtgtgactctacgcttcggttgtgcgtacaaagcacacacgtagacattcgtactttggaagacctgttaatgggcacactaggaattgtgtgccccatctgttctcagaaaccataatctacc

SEQ ID NO: 9 - DNA, 7906 bp, Homo sapiens
  source 1..7906: mol_type = genomic DNA; note = UNCseq1583
atggctgatcctgcaggtaccaatggggaagagggtacgggatgtaatggatggttttatgtagaggctgtagtggaaaaaaaaacaggggatgctatatcagatgacgagaacgaaaatgacagtgatacaggtgaagatttggtagattttatagtaaatgataatgattatttaacacaggcagaaacagagacagcacatgcgttgtttactgcacaggaagcaaaacaacatagagatgcagtacaggttctaaaacgaaagtatttgggtagtccacttagtgatattagtggatgtgtagacaataatattagtcctagattaaaagctatatgtatagaaaaacaaagtagagctgcaaaaaggagattatttgaaagcgaagacagcgggtatggcaatactgaagtggaaactcagcagatgttacaggtagaagggcgccatgagactgaaacaccatgtagtcagtatagtggtggaagtgggggtggttgcagtcagtacagtagtggaagtgggggagagggtgttagtgaaagacacactatatgccaaacaccacttacaaatattttaaatgtactaaaaactagtaatgcaaaggcagcaatgttagcaaaatttaaagagttatacggggtgagtttttcagaattagtaagaccatttaaaagtaataaatcaacgtgttgcgattggtgtattgctgcattcggacttacacccagtatagctgacagtataaaaacactattacaacaatattgtttatatttacacattcaaagtttagcatgttcatggggaatggttgtgttactattagtaagatataaatgtggaaaaaatagagaaacaattgaaaaattgctgtctaaactattatgtgtgtctccaatgtgtatgatgatagagcctccaaaattgcgtagtacagcagcagcattatattggtataaaacaggtatatcaaatattagtgaagtgtatggagacacgccagaatggatacaaagacaaacagtattacaacatagttttaatgattgtacatttgaattatcacagatggtacaatgggcctacgataatgacatagtagacgatagtgaaattgcatataaatatgcacaattggcagacactaatagtaatgcaagtgcctttctaaaaagtaattcacaggcaaaaattgtaaaggattgtgcaacaatgtgtagacattataaacgagcagaaaaaaaacaaatgagtatgagtcaatggataaaatatagatgtgatagggtagatgatggaggtgattggaagcaaattgttatgtttttaaggtatcaaggtgtagagtttatgtcatttttaactgcattaaaaagatttttgcaaggcatacctaaaaaaaattgcatattactatatggtgcagctaacacaggtaaatcattatttggtatgagtttaatgaaatttctgcaagggtctgtaatatgttttgtaaattctaaaagccatttttggttacaaccattagcagatgccaaaataggtatgttagatgatgctacagtgccctgttggaactacatagatgacaatttaagaaatgcattggatggaaatttagtttctatggatgtaaagcatagaccattggtacaactaaaatgccctccattattaattacatctaacattaatgctggtacagatcctaggtggccttatttacataatagattggtggtgtttacatttcctaatgagtttccatttgacgaaaacggaaatccagtgtatgagcttaatgataagaactggaaatcctttttctcaaggacgtggtccagattaagtttgcacgaggacgaggacaaggaaaacgatggagactctttgccaacgtttaaatgtgtgtcaggacaaaatactaacacattatgaaaatgatagtacagacctacgtgaccatatagactattggaaacacatgcgcctagaatgtgctatttattacaaggccagagaaatgggatttaaacatattaaccaccaggtggtgccaacactggctgtatcaaagaataaagcattacaagcaattgaactgcaactaacgttagaaacaatatataactcacaatatagtaatgaaaagtggacattacaagacgttagccttgaagtgtatttaactgcaccaacaggatgtataaaaaaacatggatatacagtggaagtgcagtttgatggagacatatgcaatacaatgcattatacaaactggacacatatatatatttgtgaagaagcatcagtaactgtggtagagggacaagttgactattatggtttatattatgttcatgaaggaatacgaacatattttgtgcagtttaaagatgatgcagaaaaatatagtaaaaataaagtatgggaagttcatgcgggtggtcaggtaatattatgtcctacatctgtgtttagcagcaacgaagtatcctctcctgaaattattaggcagcacttggccaaccaccccgccgcgacccataccaaagccgtcgccttgggcaccgaagaaacacagacgactatccagcgaccaagatcagagccagacaccggaaacccctgccacaccactaagttgttgcacagagactcagtggacagtgctccaatcctcactgcatttaacagcgcacacaaaggacggattaactgtaatagtaacactacacccatagtacatttaaaaggtgatgctaatactttaaaatgtttaagatatagatttaaaaagcattgtacattgtatactgcagtgtcgtctacatggcattggacaggacataatgtaaaacataaaagtgcaattgttacacttacatatgatagtgaatggcaacgtgaccaatttttgtctcaagttaaaataccaaaaactattacagtgtctactggatttatgtctatatgacaaatcttcatactgcatccacaacattactggcgtgctttttgctttgcttttgtgtgcttttgtgtgtctgcctattaatacgtccgctgcttttgtctgtgtctacatacacatcattaataatattggtattactattgtggataacagcagcctctgcgtttaggtgttttattgtatatattatatttgtttatataccattatttttaatacatacacatgcacgctttttaattacataatgtatatgtacataatgtaattgttacatataattgttgtataccataacttactattttttcttttttattttcatatataatttttttttgtgtttgtttgtttgttttttaataaactgttatcacttaacaatgcgacacaaacgttctgcaaaacgcacaaaacgtgcatcggctacccaactttataaaacatgcaaacaggcaggtacatgtccacctgacattatacctaaggttgaaggcaaaactattgctgatcaaatattacaatatggaagtatgggtgtattttttggtgggttaggaattggcacagggtcgggtacaggcggacgcactgggtatattccattgggaacaaggcctcccacagctacagatacacttgctcctgtaagaccccctttaacagtagatcctgtgggcccttctgatccttctatagtttctttagtggaagaaactagttttattgatgctggtgcaccaacatctgtaccttccattcccccagatgtatcaggatttagtattactacttcaactgataccacacctgctatattagatattaataatactgttactactgttactacacataataatcccactttcactgacccatctgtattgcagcctccaacacctgcagaaactggagggcattttacactttcatcatccactattagtacacataattatgaagaaattcctatggatacatttattgttagcacaaaccctaacacagtaactagtagcacacccataccagggtctcgcccagtggcacgcctaggattatatagtcgcacaacacaacaagttaaagttgtagaccctgcttttgtaaccactcccactaaacttattacatatgataatcctgcatatgaaggtatagatgtggataatacattatatttttctagtaatgataatagtattaatatagctccagatcctgactttttggatatagttgctttacataggccagcattaacctctaggcgtactggcattaggtacagtagaattggtaataaacaaacactacgtactcgtagtggaaaatctataggtgctaaggtacattattattatgatttcagtactattgatcctgcagaagaaatagaattacaaactataacaccttctacatatactaccacttcacatgcagcctcacctacttctattaataatggattatatgatatttatgcagatgactttattacagatacttctacaaccccggtaccatctgtaccctctacatctttatcaggttatattcctgcaaatacaacaattccttttggtggtgcatacaatattcctttagtatcaggtcctgatatacccattaatataactgaccaagctccttcattaattcctatagttccagggtctccacaatatacaattattgctgatgcaggtgacttttatttacatcctagttattacatgttacgaaaacgacgtaaacgtttaccatattttttttcagatgtctctttggctgcctagtgaggccactgtctacttgcctcctgtcccagtatctaaggttgtaagcacggatgaatatgttgcacgcacaaacatatattatcatgcaggaacatccagactacttgcagttggacatccctattttcctattaaaaaacctaacaataacaaaatattagttcctaaagtatcaggattacaatacagggtatttagaatacatttacctgaccccaataagtttggttttcctgacacctcattttataatccagatacacagcggctggtttgggcctgtgtaggtgttgaggtaggtcgtggtcagccattaggtgtgggcattagtggccatcctttattaaataaattggatgacacagaaaatgctagtgcttatgcagcaaatgcaggtgtggataatagagaatgtatatctatggattacaaacaaacacaattgtgtttaattggttgcaaaccacctataggggaacactggggcaaaggatccccatgtaccaatgttgcagtaaatccaggtgattgtccaccattagagttaataaacacagttattcaggatggtgatatggttgatactggctttggtgctatggactttactacattacaggctaacaaaagtgaagttccactggatatttgtacatctatttgcaaatatccagattatattaaaatggtgtcagaaccatatggcgacagcttatttttttatttacgaagggaacaaatgtttgttagacatttatttaatagggctggtactgttggtgaaaatgtaccagacgatttatacattaaaggctctgggtctactgcaaatttagccagttcaaattattttcctacacctagtggttctatggttacctctgatgcccaaatattcaataaaccttattggttacaacgagcacagggccacaataatggcatttgttggggtaaccaactatttgttactgttgttgatactacacgcagtacaaatatgtcattatgtgctgccatatctacttcagaaactacatataaaaatactaactttaaggagtacctacgacatggggaggaatatgatttacagtttatttttcaactgtgcaaaataaccttaactgcagacgttatgacatacatacattctatgaattccactattttggaggactggaattttggtctacaacctcccccaggaggcacactagaagatacttataggtttgtaacatcccaggcaattgcttgtcaaaaacatacacctccagcacctaaagaagatccccttaaaaaatacactttttgggaagtaaatttaaaggaaaagttttctgcagacctagatcagtttcctttaggacgcaaatttttactacaagcaggattgaaggccaaaccaaaatttacattaggaaaacgaaaagctacacccaccacctcatctacctctacaactgctaaacgcaaaaaacgtaagctgtaagtattgtatgtatgttgaattagtgttgtttgttgtgtatatgtttgtatgtgcttgtatgtgcttgtaaatattaagttgtatgtgtgtttgtatgtatggtataataaacacgtgtgtatgtgtttttaaatgcttgtgtaactattgtgtcatgcaacataaataaacttattgtttcaacacctactaattgtgttgtggttattcattgtatataaactatatttgctacatcctgtttttgttttatatatactatattttgtagcgccagcggccattttgtagcttcaaccgaattcggttgcatgctttttggcacaaaatgtgtttttttaaatagttctatgtcagcaactatggtttaaacttgtacgtttcctgcttgccatgcgtgccaaatccctgttttcctgacctgcactgcttgccaaccattccattgttttttacactgcactatgtgcaactactgaatcactatgtacattgtgtcatataaaataaatcactatgcgccaacgccttacataccgctgttaggcacatatttttggcttgttttaactaacctaattgcatatttggcataaggtttaaacttctaaggccaactaaatgtcaccctagttcatacatgaactgtgtaaaggttagtcatacattgttcatttgtaaaactgcacatgggtgtgtgcaaaccgttttgggttacacatttacaagcaacttatataataatactaaactacaataattcatgtataaaactaagggcgtaaccgaaatcggttgaaccgaaaccggttagtataaaagcagacattttatgcaccaaaagagaactgcaatgtttcaggacccacaggagcgacccagaaagttaccacagttatgcacagagctgcaaacaactatacatgatataatattagaatgtgtgtactgcaagcaacagttactgcgacgtgaggtatatgactttgcttttcgggatttatgcatagtatatagagatgggaatccatatgctgtatgtgataaatgtttaaagttttattctaaaattagtgagtatagacattattgttatagtttgtatggaacaacattagaacagcaatacaacaaaccgttgtgtgatttgttaattaggtgtattaactgtcaaaagccactgtgtcctgaagaaaagcaaagacatctggacaaaaagcaaagattccataatataaggggtcggtggaccggtcgatgtatgtcttgttgcagatcatcaagaacacgtagagaaacccagctgtaatcatgcatggagatacacctacattgcatgaatatatgttagatttgcaaccagagacaactgatctctactgttatgagcaattaaatgacagctcagaggaggaggatgaaatagatggtccagctggacaagcagaaccggacagagcccattacaatattgtaaccttttgttgcaagtgtgactctacgcttcggttgtgcgtacaaagcacacacgtagacattcgtactttggaagacctgttaatgggcacactaggaattgtgtgccccatctgttctcagaaaccataatctacc

SEQ ID NO: 10 - DNA, 7906 bp, Homo sapiens
  source 1..7906: mol_type = genomic DNA; note = UNCseq1588
atggctgatcctgcaggtaccaatggggaagagggtacgggatgtaatggatggttttatgtagaggctgtagtggaaaaaaaaacaggggatgctatatcagatgacgagaacgaaaatgacagtgatacaggtgaagatttggtagattttatagtaaatgataatgattatttaacacaggcagaaacagagacagcacatgcgttgtttactgcacaggaagcaaaacaacatagagatgcagtacaggttctaaaacgaaagtatttgggtagtccacttagtgatattagtggatgtgtagacaataatattagtcctagattaaaagctatatgtatagaaaaacaaagtagagctgcaaaaaggagattatttgaaagcgaagacagcgggtatggcaatactgaagtggaaactcagcagatgttacaggtagaagggcgccatgagactgaaacaccatgtagtcagtatagtggtggaagtgggggtggttgcagtcagtacagtagtggaagtagtggagagggtgttagtgaaagacacactatatgccaaacaccacttacaaatattttaaatgtactaaaaactagtaatgcaaaggcagcaatgttagcaaaatttaaagagttatacggggtgagtttttcagaattagtaagaccatttaaaagtaataaatcaacgtgttgcgattggtgtattgctgcattcggacttacacccagtatagctgacagtataaaaacactattacaacaatattgtttatatttacacattcaaagtttagcatgttcatggggaatggttgtgttactattagtaagatataaatgtggaaaaaatagagaaacaattgaaaaattgctgtcgaaactattatgtgtgtctccaatgtgtatgatgatagagcctccaaaattgcgtagtacagcagcagcattatattggtataaaacaggtatatcaaatattagtgaagtgtatggagacacgccagaatggatacaaagacaaacagtattacaacatagttttaatgattgtacatttgaattatcacagatggtacaatgggcctacgataatgacatagtagacgatagtgaaattgcatataaatatgcacaattggcagacactaatagtaatgcaagtgcctttctaaaaagtaattcacaggcaaaaattgtaaaggattgtgcaacaatgtgtagacattataaacgagcagaaaaaaaacaaatgagtatgagtcaatggataaaatatagatgtgatagggtagatgatggaggtgattggaagcaaattgttatgtttttaaggtatcaaggtgtagagtttatgtcatttttaactgcattaaaaagatttttgcaaggcatacctaaaaaaaattgcatattactatatggtgcagctaacacaggtaaatcattatttggtatgagtttaatgaaatttctgcaagggtctgtaatatgttttgtaaattctaaaagccatttttggttacaaccattagcagaagccaaaataggtatgttagatgatgctacagtgccctgttggaactacatagatgacaatttaagaaatgcattggatggaaatttagtttctatggatgtaaagcatagaccattggtacaactaaaatgccctccattattaattacatctaacattaatgctggtacagattctaggtggccttatttacataatagattggtggtgtttacatttcctaatgagtttccatttgacgaaaacggaaatccagtgtatgagcttaatgataagaactggaaatcctttttctcaaggacgtggtccagattaagtttgcacgaggacgaggacaaggaaaacgatggagactctttgccaacgtttaaatgtgtgtcaggacaaaatactaacacattatgaaaatgatagtacagacctacgtgaccatatagactattggaaacacatgcgcctagaatgtgctatttattacaaggccagagaaatgggatttaaacatattaaccaccaggtggtgccaacactggctgtatcaaagaataaagcattacaagcaattgaactgcaactaacgttagaaacaatatataactcacaatatagtaatgaaaagtggacattacaagacgttagccttgaagtgtatttaactgcaccaacaggatgtataaaaaaacatggatatacagtggaagtgcagtttgatggagacatatgcaatacaatgcattatacaaactggacacatatatatatttgtgaagaagcatcagtaactgtggtagagggacaagttgactattatggtttatattatgttcatgaaggaatacgaacatattttgtgcagtttaaagatgatgcagaaaaatatagtaaaaataaagtatgggaagttcatgcgggtggtcaggtaatattatgtcctacatctgtgtttagcagcaacgaagtatcctctcctgaaattattaggcagcacttggccaaccaccccgccgcgacccataccaaagccgtcgccttgggcaccgaagaaacacagacgactatccagcgaccaagatcagagccagacaccggaaacccctgccacaccactaagttgttgcacagagactcagtggacagtgctccaatcctcactgcatttaacagcgcacacaaaggacggattaactgtaatagtaacactacacccatagtacatttaaaaggtgatgctaatactttaaaatgtttaagatatagatttaaaaagcattgtacattgtatactgcagtgtcgtctacatggcattggacaggacataatgtaaaacataaaagtgcaattgttacacttacatatgatagtgaatggcaacgtgaccaatttttgtctcaagttaaaataccaaaaactattacagtgtctactggatttatgtctatatgacaaatcttgatactgcatccacaacattactggcgtgctttttgctttgcttttgtgtgcttttgtgtgtctgcctattaatacgtccgctgcttttgtctgtgtctacatacacatcattaataatattggtattactattgtggataacagcagcctctgcgtttaggtgttttattgtatatattatatttgtttatataccattatttttaatacatacacatgcacgctttttaattacataatgtatatgtacataatgtaattgttacatataattgttgtataccataacttactattttttcttttttattttcatatataatttttttttgtgtttgtttgtttgttttttaataaactgttattacttaacaatgcgacacaaacgttctgcaaaacgcacaaaacgtgcatcggctacccaactttataaaacatgcaaacaggcaggtacatgtccacctgacattatacctaaggttgaaggcaaaactattgctgatcaaatattacaatatggaagtatgggtgtattttttggtgggttaggaattggcacagggtcgggtacaggcggacgcactgggtatattccattgggaacaaggcctcccacagctacagatacacttgctcctgtaagaccccctttaacagtagatcctgtgggcccttctgatccttctatagtttctttagtggaagaaactagttttattgatgctggtgcaccaacatctgtaccttccattcccccagatgtatcaggatttagtattactacttcaactgataccacacctgctatattagatattaataatactgttactactgttactacacataataatcccactttcactgacccatctgtattgcagcctccaacacctgcagaaactggagggcattttacactttcatcatccactattagtacacataattatgaagaaattcctatggatacatttattgttagcacaaaccctaacacagtaactagtagcacacccataccagggtctcgcccagtggcacgcctaggattatatagtcgcacaacacaacaagttaaagttgtagaccctgcttttgtaaccactcccactaaacttattacatatgataatcctgcatatgaaggtatagatgtggataatacattatatttttctagtaatgataatagtattaatatagctccagatcctgactttttggatatagttgctttacataggccagcattaacctctaggcgtactggcattaggtacagtagaattggtaataaacaaacactacgtactcgtagtggaaaatctataggtgctaaggtacattattattatgatttcagtactattgatcctgcagaagaaatagaattacaaactataacaccttctacatatactaccacttcacatgcagcctcacctacttctattaataatggattatatgatatttatgcagatgactttattacagatacgtctacaaccccggtaccatctgtaccctctacatctttatcaggttatattcctgcaaatacaacaattccttttggtggtgcatacaatattcctttagtatcaggtcctgatatacccattaatataactgaccaagctccttcattaattcctatagttccagggtctccacaatatacaattattgctgatgcaggtgacttttatttacatcctagttattacatgttacgaaaacgacgtaaacgtttaccatattttttttcagatgtctctttggctgcctagtgaggccactgtctacttgcctcctgtcccagtatctaaggttgtaagcacggatgaatatgttgcacgcacaaacatatattatcatgcaggaacatccagactacttgcagttggacatccctattttcctattaaaaaacctaacaataacaaaatattagttcctaaagtatcaggattacaatacagggtatttagaatacatttacctgaccccaataagtttggttttcctgacacctcattttataatccagatacacagcggctggtttgggcctgtgtaggtgttgaggtaggtcgtggtcagccattaggtgtgggcattagtggccatcctttattaaataaattggatgacacagaaaatgctagtgcttatgcagcaaatgcaggtgtggataatagagaatgtatatctatggattacaaacaaacacaattgtgtttaattggttgcaaaccacctataggggaacactggggcaaaggatccccatgtaccaatgttgcagtaaatccaggtgattgtccaccattagagttaataaacacagttattcaggatggtgatatggttgatactggctttggtgctatggactttactacattacaggctaacaaaagtgaagttccactggatatttgtacatctatttgcaaatatccagattatattaaaatggtgtcagaaccatatggcgacagcttatttttttatttacgaagggaacaaatgtttgttagacatttatttaatagggctggtactgttggtgaaaatgtaccagacgatttatacattaaaggctctgggtctactgcaaatttagccagttcaaattattttcctacacctagtggttctatggttacctctgatgcccaaatattcaataaaccttattggttacaacgagcacagggccacaataatggcatttgttggggtaaccaactatttgttactgttgttgatactacacgcagtacaaatatgtcattatgtgctgccatatctacttcagaaactacatataaaaatactaactttaaggagtacctacgacatggggaggaatatgatttacagtttatttttcaactgtgcaaaataaccttaactgcagacgttatgacatacatacattctatgaattccactattttggaggactggaattttggtctacaacctcccccaggaggcacactagaagatacttataggtttgtaacatcccaggcaattgcttgtcaaaaacatacacctccagcacctaaagaagatccccttaaaaaatacactttttgggaagtaaatttaaaggaaaagttttctgcagacctagatcagtttcctttaggacgcaaatttttactacaagcaggattgaaggccaaaccaaaatttacattaggaaaacgaaaagctacacccaccacctcatctacctctacaactgctaaacgcaaaaaacgtaagctgtaagtattgtatgtatgttgaattagtgttgtttgttgtgtatatgtttgtatgtgcttgtatgtgcttgtaaatattaagttgtatgtgtgtttgtatgtatggtataataaacacgtgtgtatgtgtttttaaatgcttgtgtaactattgtgtcatgcaacataaataaacttattgtttcaacacctactaattgtgttgtggttattcattgtatatacactatatttgctacatcctgtttttgttttatatatactatattttgtagcgccagcggccattttgtagcttcaaccgaattcggttgcatgctttttggcacaaaatgtgtttttttaaatagttctatgtcagcaactatggtttaaacttgtacgtttcctgcttgccatgcgtgccaaatccctgttttcctgacctgcactgcttgccaaccattccattgttttttacactgcactatgtgcaactactgaatcactatgtacattgtgtcatataaaataaatcactatgcgccaacgccttacataccgctgttaggcacatatttttggcttgttttaactaacctaattgcatatttggcataaggtttaaacttctaaggccaactaaatgtcaccctagttcatacatgaactgtgtaaaggttagtcatacattgttcatttgtaaaactgcacatgggtgtgtgcaaaccgttttgggttacacatttacaagcaacttatataataatactaaactacaataattcatgtataaaactaagggcgtaaccgaaatcggttgaaccgaaaccggttagtataaaagcagacattttatgcaccaaaagagaactgcaatgtttcaggacccacaggagcgacccagaaagttaccacagttatgcacagagctgcaaacaactatacatgatataatattagaatgtgtgtactgcaagcaacagttactgcgacgtgaggtatatgactttgcttttcgggatttatgcatagtatatagagatgggaatccatatgctgtatgtgataaatgtttaaagttttattctaaaattagtgagtatagacattattgttatagtttgtatggaacaacattagaacagcaatacaacaaaccgttgtgtgatttgttaattaggtgtattaactgtcaaaagccactgtgtcctgaagaaaagcaaagacatctggacaaaaagcaaagattccataatataaggggtcggtggaccggtcgatgtatgtcttgttgcagatcatcaagaacacgtagagaaacccagctgtaatcatgcatggagatacacctacattgcatgaatatatgttagatttgcaaccagagacaactgatctctactgttatgagcaattaaatgacagctcagaggaggaggatgaaatagatggtccagctggacaagcagaaccggacagagcccattacaatattgtaaccttttgttgcaagtgtgactctacgcttcggttgtgcgtacaaagcacacacgtagacattcgtactttggaagacctgttaatgggcacactaggaattgtgtgccccatctgttctcagaaaccataatctacc

SEQ ID NO: 11 - DNA, 7906 bp, Homo sapiens
  source 1..7906: mol_type = genomic DNA; note = UNCseq1593
atggctgatcctgcaggtaccaatggggaagagggtacgggatgtaatggatggttttatgtagaggctgtagtggaaaaaaaaacaggggatgctatatcagatgacgagaacgaaaatgacagtgatacaggtgaagatttggtagattttatagtaaatgataatgattatttaacacaggcagaaacagagacagcacatgcgttgtttactgcacaggaagcaaaacaacatagagatgcagtacaggttctaaaacgaaagtatttgggtagtccacttagtgatattagtggatgtgtagacaataatattagtcctagattaaaagctatatgtatagaaaaacaaagtagagctgcaaaaaggagattatttgaaagcgaagacagcgggtatggcaatactgaagtggaaactcagcagatgttacaggtagaagggcgccatgagactgaaacaccatgtagtcagtatagtggtggaagtgggggtggttgcagtcagtacagtagtggaagtgggggagagggtgttagtgaaagacacactatatgccaaacaccacttacaaatattttaaatgtactaaaaactagtaatgcaaaggcagcaatgttagcaaaatttaaagagttatacggggtgagtttttcagaattagtaagaccatttaaaagtaataaatcaacgtgttgcgattggtgtattgctgcattcggacttacacccagtatagctgacagtataaaaacactattacaacaatattgtttatatttacacattcaaagtttagcatgttcatggggaatggttgtgttactattagtaagatataaatgtggaaaaaatagagaaacaattgaaaaattgctgtctaaactattatgtgtgtctccaatgtgtatgatgatagagcctccaaaattgcgtagtacagcagcagcattatattggtataaaacaggtatatcaaatattagtgaagtgtatggagacacgccagaatggatacaaagacaaacagtattacaacatagttttaatgattgtacatttgaattatcacagatggtacaatgggcctacgataatgacatagtagacgatagtgaaattgcatataaatatgcacaattggcagacactaatagtaatgcaagtgcctttctaaaaagtaattcacaggcaaaaattgtaaaggattgtgcaacaatgtgtagacattataaacgagcagaaaaaaaacaaatgagtatgagtcaatggataaaatatagatgtgatagggtagatgatggaggtgattggaagcaaattgttatgtttttaaggtatcaaggtgtagagtttatgtcatttttaactgcattaaaaagatttttgcaaggcatacctaaaaaaaattgcatattactatatggtgcagctaacacaggtaaatcattatttggtatgagtttaatgaaatttctgcaagggtctgtaatatgttttgtaaattctaaaagccatttttggttacaaccattagcagatgccaaaataggtatgttagatgatgctacagtgccctgttggaactacatagatgacaatttaagaaatgcattggatggaaatttagtttctatggatgtaaagcatagaccattggtacaactaaaatgccctccattattaattacatctaacattaatgctggtacagattctaggtggccttatttacataatagattggtggtgtttacatttcctaatgagtttccatttgacgaaaacggaaatccagtgtatgagcttaatgataagaactggaaatcctttttctcaaggacgtggtccagattaagtttgcacgaggacgaggacaaggaaaacgatggagactctttgccaacgtttaaatgtgtgtcaggacaaaatactaacacattatgaaaatgatagtacagacctacgtgaccatatagactattggaaacacatgcgcctagaatgtgctatttattacaaggccagagaaatgggatttaaacatattaaccaccaggtggtgccaacactggctgtatcaaagaataaagcattacaagcaattgaactgcaactaacgttagaaacaatatataactcacaatatagtaatgaaaagtggacattacaagacgttagccttgaagtgtatttaactgcaccaacaggatgtataaaaaaacatggatatacagtggaagtgcagtttgatggagacatatgcaatacaatgcattatacaaactggacacatatatatatttgtgaagaagcatcagtaactgtggtagagggacaagttgactattatggtttatattatgttcatgaaggaatacgaacatattttgtgcagtttaaagatgatgcagaaaaatatagtaaaaataaagtatgggaagttcatgcgggtggtcaggtaatattatgtcctacatctgtgtttagcagcaacgaagtatcctctcctgaaattattaggcagcacttggccaaccaccccgccgcgacccataccaaagccgtcgccttgggcaccgaagaaacacagacgactatccagcgaccaagatcagagccagacaccggaaacccctgccacaccactaagttgttgcacagagactcagtggacagtgctccaatcctcactgcatttaacagcgcacacaaaggacggattaactgtaatagtaacactacacccatagtacatttaaaaggtgatgctaatactttaaaatgtttaagatatagatttaaaaagcattgtacattgtatactgcagtgtcgtctacatggcattggacaggacataatgtaaaacataaaagtgcaattgttacacttacatatgatagtgaatggcaacgtgaccaatttttgtctcaagttaaaataccaaaaactattacagtgtctactggatttatgtctatatgacaaatcttgatactgcatccacaacattactggcgtgctttttgctttgcttttgtgtgcttttgtgtgtctgcctattaatacgtccgctgcttttgtctgtgtctacatacacatcattaataatattggtattactattgtggataacagcagcctctgcgtttaggtgttttattgtatatattatatttgtttatataccattatttttaatacatacacatgcacgctttttaattacataatgtatatgtacataatgtaattgttacatataattgttgtataccataacttactattttttcttttttattttcatatataatttttttttttgtttgtttgtttgttttttaataaactgttatcacttaacaatgcgacacaaacgttctgcaaaacgcacaaaacgtgcatcggctacccaactttataaaacatgcaaacaggcaggtacatgtccacctgacattatacctaaggttgaaggcaaaactattgctgatcaaatattacaatatggaagtatgggtgtattttttggtgggttaggaattggcacagggtcgggtacaggcggacgcactgggtatattccattgggaacaaggcctcccacagctacagatacacttgctcctgtaagaccccctttaacagtagatcctgtgggcccttctgatccttctatagtttctttagtggaagaaactagttttattgatgctggtgcaccaacatctgtaccttccattcccccagatgtatcaggatttagtattactacttcaactgataccacacctgctatattagatattaataatactgttactactgttactacacataataatcccactttcactgacccatctgtattgcagcctccaacacctgcagaaactgaagggcattttacactttcatcatccactattagtacacataattatgaagaaattcctatggatacatttattgttagcacaaaccctaacacagtaactagtagcacacccataccagggtctcgcccagtggcacgcctaggattatatagtcgcacaacacaacaagttaaagttgtagaccctgcttttgtaaccactcccactaaacttattacatatgataatcctgcatatgaaggtatagatgtggataatacattatatttttctagtaataataatagtattaatatagctccagatcctgactttttggatatagttgctttacataggccagcattaacctctaggcgtactggcattaggtacagtagaattggtaataaacaaacactacgtactcgtagtggaaaatctataggtgctaaggtacattattattatgatttcagtactattgatcctacagaagaaatagaattacaaactataacaccttctacatatactaccacttcacatgcagcctcacctacttctattaataatggattatatgatatttatgcagatgactttattacagatacttctacaaccccggtaccatctgtaccctctacatctttatcaggttatattcctgcaaatacaacaattccttttggtggtgcatacaatattcctttagtatcaggtcctgatatacccattaatataactgaccaagctccttcattaattcctatagttccagggtctccacaatatacaattattgctgatgcaggtgacttttatttacatcctagttattacatgttacgaaaacgacgtaaacgtttaccatattttttttcagatgtctctttggctgcctagtgaggccactgtctacttgcctcctgtcccagtatctaaggttgtaagcacggatgaatatgttgcacgcacaaacatatattatcatgcaggaacatccagactacttgcagttggacatccctattttcctattaaaaaacctaacaataacaaaatattagttcctaaagtatcaggattacaatacagggtatttagaatacatttacctgaccccaataagtttggttttcctgacacctcattttataatccagatacacagcggctggtttgggcctgtgtaggtgttgaggtaggtcgtggtcagccattaggtgtgggcattagtggccatcctttattaaataaattggatgacacagaaaatgctagtgcttatgcagcaaatgcaggtgtggataatagagaatgtatatctatggattacaaacaaacacaattgtgtttaattggttgcaaaccacctataggggaacactggggcaaaggatccccatgtaccaatgttgcagtaaatccaggtgattgtccaccattagagttaataaacacagttattcaggatggtgatatggttgatactggctttggtgctatggactttactacattacaggctaacaaaagtgaagttccactggatatttgtacatctatttgcaaatatccagattatattaaaatggtgtcagaaccatatggcgacagcttatttttttatttacgaagggaacaaatgtttgttagacatttatttaatagggctggtactgttggtgaaaatgtaccagacgatttatacattaaaggctctgggtctactgcaaatttagccagttcaaattattttcctacacctagtggttctatggttacctctgatgcccaaatattcaataaaccttattggttacaacgagcacagggccacaataatggcatttgttggggtaaccaactatttgttactgttgttgatactacacgcagtacaaatatgtcattatgtgctgccatatctacttcagaaactacatataaaaatactaactttaaggagtacctacgacatggggaggaatatgatttacagtttatttttcaactgtgcaaaataaccttaactgcagacgttatgacatacatacattctatgaattccactattttggaggactggaattttggtctacaacctcccccaggaggcacactagaagatacttataggtttgtaacatcccaggcaattgcttgtcaaaaacatacacctccagcacctaaagaagatccccttaaaaaatacactttttgggaagtaaatttaaaggaaaagttttctgcagacctagatcagtttcctttaggacgcaaatttttactacaagcaggattgaaggccaaaccaaaatttacattaggaaaacgaaaagctacacccaccacctcatctacctctacaactgctaaacgcaaaaaacgtaagctgtaagtattgtatgtatgttgaattagtgttgtttgttgtgtatatgtttgtatgtgcttgtatgtgcttgtaaatattaagttgtatgtgtgtttgtatgtatggtataataaacacgtgtgtatgtgtttttaaatgcttgtgtaactattgtgtcatgcaacataaataaacttattgtttcaacacctactaattgtgttgtggttattcattgtatataaactatatttcctacatcctgtttttgttttatatatactatattttgtagcgccagcggccattttgtagcttcaaccgaattcggttgcatgctttttggcacaaaatgtgtttttttaaatagttctatgtcagcaactatggtttaaacttgtacgtttcctgcttgccatgcgtgccaaatccctgttttcctgacctgcactgcttgccaaccattccattgttttttacactgcactatgtgcaactactgaatcactatgtacattgtgtcatataaaataaatcactatgcgccaacgccttacataccgctgttaggcacatatttttggcttgttttaactaacctaattgcatatttggcataaggtttaaacttctaaggccaactaaatgtcaccctagttcatacatgaactgtgtaaaggttagtcatacattgttcatttgtaaaactgcacatgggtgtgtgcaaaccgttttgggttacacatttacaagcaacttatataataatactaaactacaataattcatgtataaaactaagggcgtaaccgaaagcggttgaaccgaaaccggttagtataaaagcagacattttatgcaccaaaagagaactgcaatgtttcaggacccacaggagcgacccagaaagttaccacagttatgcacagagctgcaaacaactatacatgatataatagtagaatgtgtgtactgcaagcaacagttactgcgacgtgaggtatatgactttgcttttcgggatttatgcatagtatatagagatgggaatccatatgctgtatgtgataaatgtttaaagttttattctaaaattagtgagtatagacattattgttatagtttgtatggaacaacattagaacagcaatacaacaaaccgttgtgtgatttgttaattaggtgtattaactgtcaaaagccactgtgtcctgaagaaaagcaaagacatctggacaaaaagcaaagattccataatataaggggtcggtggaccggtcgatgtatgtcttgttgcagatcatcaagaacacgtagagaaacccagctgtaatcatgcatggagatacacctacattgcatgaatatatgttagatttgcaaccagagacaactgatctctactgttatgagcaattaaatgacagctcagaggaggaggatgaaatagatggtccagctggacaagcagaaccggacagagcccattacaatattgtaaccttttgttgcaagtgtgactctacgcttcggttgtgcgtacaaagcacacacgtagacattcgtactttggaagacctgttaatgggcacactaggaattgtgtgccccatctgttctcagaaaccataatctacc

SEQ ID NO: 12 - DNA, 7906 bp, Homo sapiens
  source 1..7906: mol_type = genomic DNA; note = UNCseq1610
atggctgatcctgcaggtaccaatggggaagagggtacgggatgtaatggatggttttatgtagaggctgtagtggaaaaaaaaacaggggatgctatatcagatgacgagaacgaaaatgacagtgatacaggtgaagatttggtagattttatagtaaatgataatgattatttaacacaggcagaaacagagacagcacatgcgttgtttactgcacaggaagcaaaacaacatagagatgcagtacaggttctaaaacgaaagtatttgggtagtccacttagtgatattagtggatgtgtagacaataatattagtcctagattaaaagctatatgtatagaaaaacaaagtagagctgcaaaaaggagattatttgaaagcgaagacagcgggtatggcaatactgaagtggaaactcagcagatgttacaggtagaagggcgccatgagactgaaacaccatgtagtcagtatagtggtggaagtgggggtggttgcagtcagtacagtagtggaagtgggggagagggtgttagtgaaagacacactatatgccaaacaccacttacaaatattttaaatgtactaaaaactagtaatgcaaaggcagcaatgttagcaaaatttaaagagttatacggggtgagtttttcagaattagtaagaccatttaaaagtaataaatcaacgtgttgcgattggtgtattgctgcattcggacttacacccagtatagctgacagtataaaaacactattacaacaatattgtttatatttacacattcaaagtttagcatgttcatggggaatggttgtgttactattagtaagatataaatgtggaaaaaatagagaaacaattgaaaaattgctgtctaaactattatgtgtgtctccaatgtgtatgatgatagagcctccaaaattgcgtagtacagcagcagcattatattggtataaaacaggtatatcaaatattagtgaagtgtatggagacacgccagaatggatacaaagacaaacagtattacaacatagttttaatgattgtacatttgaattatcacagatggtacaatgggcctacgataatgacatagtagacgatagtgaaattgcatataaatatgcacaattggcagacactaatagtaatgcaagtgcctttctaaaaagtaattcacaggcaaaaattgtaaaggattgtgcaacaatgtgtagacattataaacgagcagaaaaaaaacaaatgagtatgagtcaatggataaaatatagatgtgatagggtagatgatggaggtgattggaagcaaattgttatgtttttaaggtatcaaggtgtagagtttatgtcatttttaactgcattaaaaagatttttgcaaggcatacctaaaaaaaattgcatattactatatggtgcagctaacacaggtaaatcattatttggtatgagtttaatgaaatttctgcaagggtctgtaatatgttttgtaaattctaaaagccatttttggttacaaccattagcagatgccaaaataggtatgttagatgatgctacagtgccctgttggaactacatagatgacaatttaagaaatgcattggatggaaatttagtttctatggatgtaaagcatagaccattggtacaactaaaatgccctccattattaattacatctaacattaatgctggtacagattctaggtggccttatttacataatagattggtggtgtttacatttcctaatgagtttccatttgacgaaaacggaaatccagtgtatgagcttaatgataagaactggaaatcctttttctcaaggacgtggtccagattaagtttgcacgaggacgaggacaaggaaaacgatggagactctttgccaacgtttaaatgtgtgtcaggacaaaatactaacacattatgaaaatgatagtacagacctacgtgaccatatagactattggaaacacatgcgcctagaatgtgctatttattacaaggccagagaaatgggatttaaacatattaaccaccaggtggtgccaacactggctgtatcaaagaataaagcattacaagcaattgaactgcaactaacgttagaaacaatatataactcacaatatagtaatgaaaagtggacattacaagacgttagccttgaagtgtatttaactgcaccaacaggatgtataaaaaaacatggatatacagtggaagtgcagtttgatggagacatatgcaatacaatgcattatacaaactggacacatatatatatttgtgaagaagcatcagtaactgtggtagagggacaagttgactattatggtttatattatgttcatgaaggaatacgaacatattttgtgcagtttaaagatgatgcagaaaaatatagtaaaaataaagtatgggaagttcatgcgggtggtcaggtaatattatgtcctacatctgtgtttagcagcaacgaagtatcctctcctgaaattattaggcagcacttggccaaccaccccgccgcgacccataccaaagccgtcgccttgggcaccgaagaaacacagacgactatccagcgaccaagatcagagccagacaccggaaacccctgccacaccactaagttgttgcacagagactcagtggacagtgctccaatcctcactgcatttaacagcgcacacaaaggacggattaactgtaatagtaacactacacccatagtacatttaaaaggtgatgctaatactttaaaatgtttaagatatagatttaaaaagcattgtacattgtatactgcagtgtcgtctacatggcattggacaggacataatgtaaaacataaaagtgcaattgttacacttacatatgatagtgaatggcaacgtgaccaatttttgtctcaagttaaaataccaaaaactattacagtgtctactggatttatgtctatatgacaaatcttgatactgcatccacaacattactggcgtgctttttgctttgcttttgtgtgcttttgtgtgtctgcctattaatacgtccgctgcttttgtctgtgtctacatacacattattaataatattggtattactattgtggataacagcagcctctgcgtttaggtgttttattgtatatattatatttgtttatataccattatttttaatacatacacatgcacgctttttaattacataatgtatatgtacataatgtaattgttacatataattgttgtataccataacttactattttttcttttttattttcatatataatttttttttgtgtttgtttgtttgttttttaataaactgttatcacttaacaatgcgacacaaacgttctgcaaaacgcacaaaacgtgcatcggctacccaactttataaaacatgcaaacaggcaggtacatgtccacctgacattatacctaaggttgaaggcaaaactattgctgatcaaatattacaatatggaagtatgggtgtattttttggtgggttaggaattggcacagggtcgggtacaggcggacgcactgggtatattccattgggaacaaggcctcccacagctacagatacacttgctcctgtaagaccccctttaacagtagatcctgtgggcccttctgatccttctatagtttctttagtggaagaaactagttttattgatgctggtgcaccaacatctgtaccttccattcccccagatgtatcaggatttagtattactacttcaactgataccacacctgctatattagatattaataatactgttactactgttactacacataataatcccactttcactgacccatctgtattgcagcctccaacacctgcagaaactggagggcattttacactttcatcatccactattagtacacataattatgaagaaattcctatggatacatttattgttagcacaaaccctaacacagtaactagtagcacacccataccagggtctcgcccagtggcacgcctaggattatatagtcgcacaacacaacaagttaaagttgtagaccctgcttttgtaaccactcccactaaacttattacatatgataatcctgcatatgaaggtatagatgtggataatacattatatttttctagtaatgataatagtattaatatagctccagatcctgactttttggatatagttgctttacataggccagcattaacctctaggcgtactggcattaggtacagtagaattggtaataaacaaacactacgtactcgtagtggaaaatctataggtgctaaggtacattattattatgatttcagtactattgatcctgcagaagaaatagaattacaaactataacaccttctacatatactaccacttcacatgcagcctcacctacttctattaataatggattatatgatatttatgcagatgactttattacagatacttctacaaccccggtaccatctgtaccctctacatctttatcaggttatattcctgcaaatacaacaattccttttggtggtgcatacaatattcctttagtatcaggtcctgatatacccattaatataactgaccaagctccttcattaattcctatagttccagggtctccacaatatacaattattgctgatgcaggtgacttttatttacatcctagttattacatgttacgaaaacgacgtaaacgtttaccatattttttttcagatgtctctttggctgcctagtgaggccactgtctacttgcctcctgtcccagtatctaaggttgtaagcacggatgaatatgttgcacgcacaaacatatattatcatgcaggaacatccagactacttgcagttggacatccctattttcctattaaaaaacctaacaataacaaaatattagttcctaaagtatcaggattacaatacagggtatttagaatacatttacctgaccccaataagtttggttttcctgacacctcattttataatccagatacacagcggctggtttgggcctgtgtaggtgttgaggtaggtcgtggtcagccattaggtgtgggcattagtggccatcctttattaaataaattggatgacacagaaaatgctagtgcttatgcagcaaatgcaggtgtggataatagagaatgtatatctatggattacaaacaaacacaattgtgtttaattggttgcaaaccacctataggggaacactggggcaaaggatccccatgtaccaatgttgcagtaaatccaggtgattgtccaccattagagttaataaacacagttattcaggatggtgatatggttgatactggctttggtgctatggactttactacattacaggctaacaaaagtgaagttccactggatatttgtacatctatttgcaaatatccagattatattaaaatggtgtcagaaccatatggcgacagcttatttttttatttacgaagggaacaaatgtttgttagacatttatttaatagggctggtactgttggtgaaaatgtaccagacgatttatacattaaaggctctgggtctactgcaaatttagccagttcaaattattttcctacacctagtggttctatggttacctctgatgcccaaatattcaataaaccttattggttacaacgagcacagggccacaataatggcatttgttggggtaaccaactatttgttactgttgttgatactacacgcagtacaaatatgtcattatgtgctgccatatctacttcagaaactacatataaaaatactaactttaaggagtacctacgacatggggaggaatatgatttacagtttatttttcaactgtgcaaaataaccttaactgcagacgttatgacatacatacattctatgaattccactattttggaggactggaattttggtctacaacctcccccaggaggcacactagaagatacttataggtttgtaacatcccaggcaattgcttgtcaaaaacatacacctccagcacctaaagaagatccccttaaaaaatacactttttgggaagtaaatttaaaggaaaagttttctgcagacctagatcagtttcctttaggacgcaaatttttactacaagcaggattgaaggccaaaccaaaatttacattaggaaaacgaaaagctacacccaccacctcatctacctctacaactgctaaacgcaaaaaacgtaagctgtaagtattgtatgtatgttgaattagtgttgtttgttgtgtatatgtttgtatgtgcttgtatgtgcttgtaaatattaagttgtatgtgtgtttgtatgtatggtataataaacacgtgtgtatgtgtttttaaatgcttgtgtaactattgtgtcatgcaacataaataaacttattgtttcaacacctactaattgtgttgtggttattcattgtatatacactatatttgctacatcctgtttttgttttatatatactatattttgtagcgccagcggccattttgtagcttcaaccgaattcggttgcatgctttttggcacaaaatgtgtttttttaaatagttctatgtcagcaactatggtttaaacttgtacgtttcctgcttgccatgcgtgccaaatccctgttttcctgacctgcactgcttgccaaccattccattgttttttacactgcactatgtgcaactactgaatcactatgtacattgtgtcatataaaataaatcactatgcgccaacgccttacataccgctgttaggcacatatttttggcttgttttaactaacctaattgcatatttggcataaggtttaaacttctaaggccaactaaatgtcaccctagttcatacatgaactgtgtaaaggttagtcatacattgttcatttgtaaaactgcacatgggtgtgtgcaaaccgttttgggttacacatttacaagcaacttatataataatactaaactacaataattcatgtataaaactaagggcgtaaccgaaatcggttgaaccgaaaccggttagtataaaagcagacattttatgcaccaaaagagaactgcaatgtttcaggacccacaggagcgacccagaaagttaccacagttatgcacagagctgcaaacaactatacatgatataatattagaatgtgtgtactgcaagcaacagttactgcgacgtgaggtatatgactttgcttttcgggatttatgcatagtatatagagatgggaatccatatgctgtatgtgataaatgtttaaagttttattctaaaattagtgagtatagacattattgttatagtttgtatggaacaacattagaacagcaatacaacaaaccgttgtgtgatttgttaattaggtgtattaactgtcaaaagccactgtgtcctgaagaaaagcaaagacatctggacaaaaagcaaagattccataatataaggggtcggtggaccggtcgatgtatgtcttgttgcagatcatcaagaacacgtagagaaacccagctgtaatcatgcatggagatacacctacattgcatgaatatatgttagatttgcaaccagagacaactgatctctactgttatgagcaattaaatgacagctcagaggaggaggatgaaatagatggtccagctggacaagcagaaccggacagagcccattacaatattgtaaccttttgttgcaagtgtgactctacgcttcggttgtgcgtacaaagcacacacgtagacattcgtactttggaagacctgttaatgggcacactaggaattgtgtgccccatctgttctcagaaaccataatctacc

SEQ ID NO: 13 - DNA, 7906 bp, Homo sapiens
  source 1..7906: mol_type = genomic DNA; note = UNCseq1628
atggctgatcctgcaggtaccaatggggaagagggtacgggatgtaatggatggttttatgtagaggctgtagtggaaaaaaaaacaggggatgctatatcagatgacgagaacgaaaatgacagtgatacaggtgaagatttggtagattttatagtaaatgataatgattatttaacacaggcagaaacagagacagcacatgcgttgtttactgcacaggaagcaaaagaacatagagatgcagtacaggttctaaaacgaaagtatttgggtagtccacttagtgatattagtggatgtgtagacaataatattagtcctagattaaaagctatatgtatagaaaaacaaagtagagctgcaaaaaggagattatttgaaagcgaagacagcgggtatggcaatactgaagtggaaactcagcagatgttacaggtagaagggcgccatgagactgaaacaccatgtagtcagtatagtggtggaagtgggggtggtagcagtcagtatagtagtggaagtgggggagagggtgttagtgaaagacacactatatgccaaacaccacttacaaatattttaaatgtactaaaaactagtaatgcaaaggcagcaatgctagcaaaatttaaagagttatacggggtgagtttttcagaattagtaagaccatttaaaagtaataaatcaacgtgttgcgattggtgtattgctgcatttggacttacacctagtatagctgacagtataaaaacattattacaacaatattgtttatatttacacattcaaagtttagcatgttcatggggaatggttgtgttactattagtaagatataaatgtggaaaaaatagagaaacaattgaaaaattgctgtctaaactattatgtgtgtctccaatgtgtatgatgatagagcctccaaaattgcgtagtacagcagcagcattatattggtataaaacaggtatgtcaaatattagtgaagtgtatggagacacgccagaatggatacaaagacaaacagtattacaacatagttttaatgattgtacatttgaattatcacagatggtacaatgggcctacgataatgacatagtagacgatagtgaaattgcatataaatatgcacaattggcagacactaatagtaatgcaagtgcctttttaaaaagtaattcacaggcaaaaattgtaaaggattgtgcaacaatgtgtagacattataaacgagcagaaaaaaaacaaatgagtatgagtcaatggataaaatatagatgtgatagggtagatgatggaggtgattggaagcaaattgttatgtttttaaggtatcaaggtgtagactttatgtcatttttaactgcattaaaaagatttttgcaaggcatacctaaaaaaaattgcatattactatatggtgcagctaacacaggtaaatcattatttggtatgagtttgatgaaatttttgcaagggtctgtaatatgttttgtaaattctaaaagccatttttggttacaaccattagcagatgccaaaataggtatgttagatgatgctacagtgccctgttggaactacatagatgacaatttaagaaatgcattggatggaaatttagtttctatggatgtaaagcatagaccattggtacaactaaaatgccctccattattaattacatctaacattaatgctggtacagattccaggtggccttatttacataatagattggtggtgtttacatttccaaatgagtttccatttgacgaaaacggaaatccagtgtatgagcttaatgataagaactggaaatcctttttctcaaggacgtggtccagattaagtttgcacgaggacgaggacaaggaaaacgatggagactctttgccaacgtttaaatgtgtgtcaggacaaaatactaacacattatgaaaatgatagtacagacctacgtgaccatatagactattggaaacaaatgcgcctagaatgtgctatttattacaaggccagagaaatgggatttaaacatattaaccaccaggtggtgccaacactggctgtatcaaagaataaagcattacaagcaattgaactgcaactaacgttagaaacaatatataactcacaatatagtaatgaaaagtggacattacaagacgttagccttgaagtgtatttaactgcaccaacaggatgtataaaaaaacatggatatacagtggaagtgcagtttgatggagacatatgcaatacaatgcattatacaaactggaaatatatatatatttgtgaagaaacatcagtaactgtggtagagggtcaagttgactattatggtttatattatgtccatgaaggaatacaaacatattttgtgcagtttaaagatgatgcagaaaaatatagtaaaaataaagtatgggaagttcatgcgggtggtcaggtaatattatgtcctacatctgtgtttagcagcgacgaagtatcctctgctgaaattattaggcagcacttggccaaccactccgccgcgacccatcccaaagccgtcgccttgggcaccgaagaaacacagacgactatccagcgaccaagatcagagccagacaccggaaacccctgccacaccactaagttgttgcacagagactcagtggacagtgctccaatcctcactgcagttaacagctcacacaaaggacggattaactgtaatagtaacactacacccatagtacatttaaaaggtgatgctaatactttaaaatgtttaagatatagatttaaaaagcattgtaaattgtatacagcagtgtcgtctacatggcattggacaggacataatgtaaaacataaaagtgcaattgttacacttacatatgatagtgaatgtcaacgggaacaatttttgtctcaagttaaaataccaaaaactattacagtgtctactggatttatgtctatatgacaaatcttgatactgcatccacaacattactggcgtgctttttgctttgcttttgtgtgcttttgtgtgtctgcctattaatacgtccgctgcttttgtctgtgtctacatacacatcattaatactattggtattattattgtggataacagcagcctctgcgtttaggtgttttattgtatatattttatttgtttatataccattatttttaatacatacacatgcacgcttcttaattacataatgtatatgtacataatgtaattgttacatataattgttgtatatcataacttactattttttcttttttattttcatatataatttttttttttgtttgtttgtttgttttttaataaactgttattacttaacaatgcgacacaaacgttctgcaaaacgcacaaaacgtgcatcggctacccaactttataaaacatgcaaacaggcaggtacatgtccacctgacattatacctaaggttgaaggcaaaactattgctgatcaaatattacaatatggaagtatgggtgtattttttggtgggttaggaattggaacagggtcgggtacaggcggacgcactgggtatattccattgggaacaaggcctcccacagctacagatacacttgctcctgtaagaccccctttaacagtagatcctgtgggcccttctgatccttctatagtttctttagtggaagaaactagttttattgatgctggtgcaccaacacctgtaccttccattcccccagatgtatcaggatttagtattacaacttcaactgatgccacacctgctatattagatattaataatactgttactactgttactacacataataatcccacttttactgacccatctgtattgcagcctccaacacctgcagaaactggagggcattttacactttcatcatccactattagtacacataattatgaagaaattcctatggatacatttattgttagcacaaaccctaacacagtaactagtagcacacccataccagggtctcgcccagtggcacgcctaggattatatagtcgcacaacacaacaagttaaagttgtagaccctgcttttgtaaccactcccactaaacttattacatatgataatcctgcatatgaaggtatagatgtggataatacattatattttcctagtaatgataatagtattaatatagctccagatcctgactttttggatatagttgctttacataggccagcattaacctctaggcgtactggcattagatacagtagaattggtaataaacaaacactacgtactcgtagtggaaaatctataggtgctaaggtacattattattatgatttaagtactattaatcctgcagaagaaatagaattacaaactataacaccttctacatatactaccgcttcacatgcagcctcacccacttctattaataatggattatatgatatttatgcagatgactttattacagatacttctacaaccccggtaccatctgtaccctctacatccttatcaggttatattcctgcaaatacaacaattccttttggtggtgcatacaatattcctttagtatcaggtcctgatatacccattaatataactgaccaaactccttcattaattcctatagttccagggtctccacaatatacaattattgctgatgcaggtgacttttatttacatcctagttattacatgttacgaaaacgacgtaaacgtttaccatattttttttcagatgtctctttggctgcctagcgaggccactgtctacttgcctcctgtcccagtatctaaagttgtaagcacggatgaatatgttgcacgcacaaacatatattatcatgcaggaacatccagactacttgcagttggacatccctattttcctattaaaaaacctaacaataacaaaatattagttcctaaagtatcaggattacaatacagggtatttagaatacatttacctgaccccaataagtttggttttcctgacacctcattttacaatccagatacacagcggctggtttgggcctgtgtaggtgttgaggtaggtcgtggtcagccattaggtgtgggcattagtggccatcctttattaaataaattggatgacacagaaaatgctagtgcttatgcagcaaatgcaggtgtggataatagagaatgtatatctatggattacaaacaaacacaattgtgtttaattggttgcaaaccacctataggggaacactggggcaaaggatccccatgtaccaatgttgcagtaaatccaggtgattgtccaccattagagttaataaacacagttattcaggatggtgatatggttgataccggctttggtgctatggactttactacattacaggctaacaaaagtgaagttccactggatatttgtacgtctatttgcaaatatccagattatattaaaatggtgtcagaaccatatggcgacagcttatttttttatttacgaagggaacaaatgtttgttagacatttatttaatagggctggtactgttggtgaaaatgtaccagacgatttatacattaaaggctctgggtctactgcaaatttagccagttcaaattattttcctacacctagtggttctatggttacctctgatgcccaaatatttaataaaccatattggttacaacgagcacagggccacaataatggcatttgttggggtaaccaactatttgttactgttgttgatactacacgcagtacaaatatgtcattatgtgctgccatatctacttcagaaactacatataaaaatactaactttaaagagtacctacgacatggggaggaatatgatttacagtttatttttcaactgtgcaaaataaccttaactgcagacgttatgacatacatacattctatgaattccactattttggaggactggaattttggtttacaacctcccccaggaggcacactagaagatacttataggtttgtaacatcccaggcaattgcttgtcaaaaacatacacctccagcacctaaagaagatccccttaaaaaatatactttttgggaagtaaatttaaaagaaaagttttctgcagacctagatcagtttcctttaggacgcaaatttttactacaagcaggattgaaggccaaaccaaaatttacattaggaaaacgaaaagctacacccaccacctcatctacctctacaactgctaaacgcaaaaaacgtaagctgtaagtattgtatgtatgttgaattagtgttgtttgttgtgtatatgtttgtatgtgcttgtatgtgcttgtaaatattaagttgtatgtgtgtttgtatgtatggtataataaacacgtgtgtatgtgtttttaaatgcgtgtgtaactattgtgtcatgcaacataaataaacttattgtttcaacacctactaattgtgttgtggttattcattgtatataaactatatttgctacatcctgtttttgttttatatatactatattttgtagcgccagcggccattttgtagcttcaaccgaattcggttgcatgctttttggcacaaaatgtgtttttttaaatagttctatgtcagcaactatggtttaaacttgtacgtttcctgcttgccatgcgtgccaaatccctgttttcctgacctgcactgcttgccaaccattccattgttttttacactgcactatgtgcaactactgaatcactatgtacattgtgtcatataaaataaatcactatgcgccaacgccttaaataccgctgttaggcacatattttaggcttgttttaactaacctaattgcatatttggcataaggtttaaacttttaaggccaactaaatgtcaccttagttcatacatgaactgtgtaaaggttagtcatacattgttcatttttaaaactgcacatgggtgtgtgcaaaccgttttgggttacaaatttacaagcaacttatataataatactaaactacaataattcatgtataaaactaagggtgtaaccgaaatcggttgaaccgaaaccggttagtataaaagcagacattttctgcaccaaaagagaactgcaatgtttcaggacccacaggagcgacccagaaagttaccacagttatgcacagagctgcaaacaactatacatgatataatattagaatgtgtgtactgcaagcaacagttactgcgacgtgaggtatatgactttgcttttcgggatttatgcatagtatatagagatgggaatccatatgcagtgtgtgataaatgtttaaagttttattctaaaattagtgagtatagatattattgttatagtttgtatggaacaacattagaacagcaatacaacaaaccgttgtgtgatttgttaattaggtgtattaactgtcaaaagccactgtgtcctgaagaaaagcaaagacatctggacaaaaagcaaagattccataatataaggggtcggtggaccggtcgatgtatgtcttgttgcagatcatcaagaacacgtagagaaacccagctgtaatcatgcatggagatacacctacattgcatgaatatatgttagatttgcaaccagagacaactgatctctactgttatgagcaattaaatgacagctcagaggaggaggatgaaatagatggtccagctggacaagcagaaccggacagagcccattacaatattgtaaccttttgttgcaagtgtgactctacgcttcggttgtgcgtacaaagcacacacgtagacatccgtacgttggaagacctgttaatgggcacactaggaattgtgtgccccatctgttctcagaaaccataatctacc

SEQ ID NO: 14 - DNA, 7906 bp, Homo sapiens
  source 1..7906: mol_type = genomic DNA; note = UNCseq1662
atggctgatcctgcaggtaccaatggggaagagggtacgggatgtaatggatggttttatgtagaggctgtagtggaaaaaaaaacaggggatgctatatcagatgacgaaaacgaaaatgacagtgatacaggtgaagatttggtagattttatagtaaatgataatgattatttaacacaggcagaaacagagacagcacatgcgttgtttactgcacaggaagcaaaacaacatagagatgcagtacaggttctaaaacgaaagtatttgggtagtccacttagtgatattagtggatgtgtagacaataatattagtcctagattaaaagctatatgtatagaaaaacaaagtagagctgcaaaaaggagattatttgaaagcgaagacagcgggtatggcaatactgaagtggaaactcagcagatgttacaggtagaagggcgccatgagactgaaacaccatgtagtcagtatagtggtggaagtgggggtggttgcagtcagtacagtagtggaagtgggggagagggtgttagtgaaagacacactatatgccaaacaccacttacaaatattttaaatgtactaaaaactagtaatgcaaaggcagcaatgttagcaaaatttaaagagttatacggggtgagttttacagaattagtaagaccatttaaaagtaataaatcaacgtgttgcgattggtgtattgctgcatttggacttacacccagtatagctgacagtataaaaacactattacaacaatattgtttatatttacacattcaaagtttagcatgttcatggggaatggttgtgttactattagtaagatataaatgtggaaaaaatagagaaacaattgaaaaattgctgtctaaactattatgtgtgtctccaatgtgtatgatgatagagcctccaaaattgcgtagtacagcagcagcattatattggtataaaacaggtatatcaaatattagtgaagtgtatggagacacgccagaatggatacaaagacaaacagtattacaacatagttttaatgattgtacatttgaattatcacagatggtacaatgggcctacgataatgacatagtagacgatagtgaaattgcatataaatatgcacaattggcagacactaatagtaatgcaagtgcctttctaaaaagtaattcacaggcaaaaattgtaaaggattgtgcaacaatgtgtagacattataaacgagcagaaaaaaaacaaatgagtatgagtcaatggataaaatatagatgtgatagggtagatgatggaggtgattggaagcaaattgttatgtttttaaggtatcaaggtgtagagtttatgtcatttttaactgcattaaaaagatttttgcaaggcatacctaaaaaaaattgcatattactatatggtgcagctaacacaggtaaatcattatttggtatgagtttaatgaaatttctgcaagggtctgtaatatgttttgtaaattctaaaagccatttttggttacaaccattagcagatgccaaaataggtatgttagatgatgctacagtgccctgttggaactatatagatgacaatttaagaaatgcattggatggaaatttagtttctatggatgtaaagcatagaccattggtacaactaaaatgccctccattattaattacatctaacattaatgctggtacagattctaggtggccttatttacataatagattggtggtgtttacatttcctaatgagtttccatttgacgaaaacggaaatccagtgtatgagcttaatgataagaactggaaatcctttttctcaaggacgtggtccagattaagtttgcacgaggacgaggacaaggaaaacgatggagactctttgccaacgtttaaatgtgtgtcaggacaaaatactaacacattatgaaaatgatagtacagacctacgtgaccatatagactattggaaacacatgcgcctagaatgtgctatttattacaaggccagagaaatgggatttaaacatattaaccaccaggtggtgccaacgctggctgtatcaaagaataaagcattacaagcaattgaactgcaactaacgttagaaacaatatataactcacaatatagtaatgaaaagtggacattacaagacgttagccttgaagtgtatttaactgcaccaacaggatgtataaaaaaacatggatatacagtggaagtgcagtttgatggagacatatgcaatacaatgcattatacaaactggacacatatatatatttgtgaagaagcatcagtaactgtggtagagggtcaagttgactattatggtttatattatgttcatgaaggaatacgaacatattttgtgcagtttaaagatgatgcagaaaaatatagtaaaaataaagtatgggaagttcatgcgggtggtcaggtaatattatgtcctacatctgtgtttagcagcaacgaagtatcctctcctgaaactattaggcagcacttggccaaccactccgccgcgacccataccaaagccgtcgccttgggcaccgaagaaacacagacgactatccagcgaccaagatcagagccagacaccggaaacccctgccacaccactaagttgttgcacagagactcagtggacagtgctccaatcctcactgcatttaacagctcacacaaaggacggattaactgtaatagtaacactacacccatagtacatttaaaaggtgatgctaatactttaaaatgtttaagatatagatttaaaaagcattgtaaattgtatactgcagtgtcgtctacatggcattggacaggacataatgtaaaacataaaagtgcaattgttacacttacatatgatagtgaatggcaacgtgaccaatttttgtctcaagttaaaataccaaaaactattacagtgtctactggatttatgtctatatgacaaatcttgatactgcatccacaacattactggcgtgctttttgctttgcttttgtgtgcttttgtgtgtctgcctattaatacgtccgctgcttttgtctgtgtctacatacacatcattaatactattggtattactattgtggataacagcagcctctgcgtttaggtgttttattgtatatattgtatttgtttatataccattatttttaatacatacacatgcacgctttttaattacataatgtatatgtacataatgtaattgttacatataattgttgtataccataacttactattttttcttttttatttttatatataatttttttttttgtttgtttgtttgttttttaataaactgttatcacttaacaatgcgacacaaacgttctgcaaaacgcacaaaacgtgcatcggctacccaactttataaaacatgcaaacaggcaggtacatgtccacctgacattatacctaaggttgaaggcaaaactattgctgatcaaatattacaatatggaagtatgggtgtattttttggtgggttaggaattggaacagggtcgggtacaggcggacgcactgggtatattccattgggaacaaggcctcccacagctacagatacacttgctcctgtaagaccccctttaacagtagatcctgtgggcccttctgatccttctatagtttctttagtggaagaaactagttttattgatgctggtgcaccaacatctgtaccttccattcccccagatgtatcaggatttagtattactacttcaactgataccacacctgctatattagatattaataatactgttactactgttactacacataataatcccactttcactgacccatctgtattgcagcctccaacacctgcagaaactggagggcattttacactttcatcatccactattagtacacataattatgaagaaattcctatggatacatttattgttagcacaaaccctaacacagtaactagtagcacacccataccagggtctcgcccagtggcacgcctaggattatatagtcgcacaacacaacaagttaaagttgtagaccctgcttttgtaaccactcccactaaacttattacatatgataatcctgcatatgaaggtatagatgtggataatacattatattttcctagtaatgataatagtattaatatagctccagatcctgactttttggatatagttgctttacataggccagcattaacctctaggcgtactggcattaggtacagtagaattggtaataaacaaacactacgtactcgtagtggaaaatctataggtgctaaggtacattattattatgatttgagtactattgatcctgcagaagaaatagaattacaaactataacaccttctacatatactaccacttcacatgcagcctcacctacttctattaataatggattatatgatatttatgcagatgactttattacagatacttctacaaccccggtaccatctgtaccctctacatctttatcaggttatattcctgcaaatacaacaattccttttggtggtgcatacaatattcctttagtatcaggtcctgatatacccattaatataactgaccaagctccttcattaattcctatagttccagggtctccacaatatacaattattgctgatgcaggtgacttttatttacatcctagttattacatgttacgaaaacgacgtaaacgtttaccatattttttttcagatgtctctttggctgcctagtgaggccactgtctacttgcctcctgtcccagtatctaaggttgtaagcacggatgaatatgttgcacgcacaaacatatattatcatgcaggaacatccagactacttgcagttggacatccctattttcctattaaaaaacctaacaataacaaaatattagttcctaaagtatcaggattacaatacagggtatttagaatacatttacctgaccccaataagtttggttttcctgacacctcattttataatccagatacacagcggctggtttgggcctgtgtaggtgttgaggtaggtcgtggtcagccattaggtgtgggcattagtggccatcctttattaaataaattggatgacacagaaaatgctagtgcttatgcagcaaatgcaggtgtggataatagagaatgtatatctatggattacaaacaaacacaattgtgtttaattggttgcaaaccacctataggggaacactggggcaaaggatccccatgtaccaatgttgcagtaaatccaggtgattgtccaccattagagttaataaacacagttattcaggatggtgatatggttgatactggctttggtgctatggactttactacattacaggctaacaaaagtgaagttccactggatatttgtacatctatttgcaaatatccagattatattaaaatggtgtcagaaccatatggcgacagcttatttttttatttacgaagggaacaaatgtttgttagacatttatttaatagggctggtgctgttggtgaaaatgtaccagacgatttatacattaaaggctctgggtctactgcaaatttagccagttcaaattattttcctacacctagtggttctatggttacctctgatgcccaaatattcaataaaccttattggttacaacgagcacagggccacaataatggcatttgttggggtaaccaactatttgttactgttgttgatactacacgcagtacaaatatgtcattatgtgctgccatatctacttcagaaactacatataaaaatactaactttaaggagtacctacgacatggggaggaatatgatttacagtttatttttcaactgtgcaaaataaccttaactgcagacgttatgacatacatacattctatgaattccactattttggaggactggaattttggtctacaacctcccccaggaggcacactagaagatacttataggtttgtaacatcccaggcaattgcttgtcaaaaacatacacctccagcacctaaagaagatccccttaaaaaatacactttttgggaagtaaatttaaaggaaaagttttctgcagacctagatcagtttcctttaggacgcaaatttttactacaagcaggattgaaggccaaaccaaaatttacattaggaaaacgaaaagctacacccaccacctcatctacctctacaactgctaaacgcaaaaaacgtaagctgtaagtattgtatgtatgttgaattagtgttgtttgttgtgtatatgtttgtatgtgcttgtatgtgcttgtaaatattaagttgtatgtgtgtttgtatgtatggtataataaacacgtgtgtatgtgtttttaaatgcttgtgtaactattgtgtcatgcaacataaataaacttattgtttcaacacctactaattgtgttgtggttattcattgtatataaactatatttgctacatcctgtttttgttttatatatactatattttgtagcgccagcggccattttgtagcttcaaccgaattcggttgcatgctttttggcacaaaatgtgtttttttaaatagttctatgtcagcaactatggtttaaacttgtacgtttcctgcttgccatgcgtgccaaatccctgttttcctgacctgcactgcttgccaaccattccattgttttttacactgcactatgtgcaactactgaatcactatgtacattgtgtcatataaaataaatcactatgcgccaacgccttacataccgctgttaggcacatatttttggcttgttttaactaacctaattgcatatttggcataaggtttaaacttctaaggccaactaaatgtcaccctagttcatacatgaactgtgtaaaggttagtcatacattgttcatttgtaaaactgcacatgggtgtgtgcaaaccgttttgggttacacatttacaagcaacttatataataatactaaactacaataattcatgtataaaactaagggcgtaaccgaaatcggttgaaccgaaaccggttagtataaaagcagacattttatgcaccaaaagagaactgcaatgtttcaggacccacaggagcgacccagaaagttaccacagttatgcacagagctgcaaacaactatacatgatataatattagaatgtgtgtactgcaagcaacagttactgcgacgtgaggtatatgactttgcttttcgggatttatgcatagtatatagagatgggaatccatatgctgtatgtgataaatgtttaaagttttattctaaaattagtgagtatagacattattgttatagtttgtatggaacaacattagaacagcaatacaacaaaccgttgtgtgatttgttaattaggtgtattaactgtcaaaagccactgtgtcctgaagaaaagcaaagacatctggacaaaaagcaaagattccataatataaggggtcggtggaccggtcgatgtatgtcttgttgcagatcatcaagaacacgtagagaaacccagctgtaatcatgcatggagatacacctacattgcatgaatatatgttagatttgcaaccagagacaactgatctctactgttatgagcaattaaatgacagctcagaggaggaggatgaaatagatggtccagctggacaagcagaaccggacagagcccattacaatattgtaaccttttgttgcaagtgtgactctacgcttcggttgtgcgtacaaagcacacacgtagacattcgtactttggaagacctgttaatgggcacactaggaattgtgtgccccatctgttctcagaaaccataatctacc

SEQ ID NO: 15 - DNA, 7906 bp, Homo sapiens
  source 1..7906: mol_type = genomic DNA; note = UNCseq1678
atggctgatcctgcaggtaccaatggggaagagggtacgggatgtaatggatggttttatgtagaggctgtagtggaaaaaaaaacaggggatgctatatcagatgacgagaacgaaaatgacagtgatacaggtgaagatttggtagattttatagtaaatgataatgattatttaacacaggcagacacagagacagcacatgcgttgtttactgcacaggaagcaaaacaacatagagatgcagtacaggttctaaaacgaaagtatttgggtagtccacttagtgatattagtggatgtgtagacaataatattagtcctagattaaaagctatatgtatagaaaaacaaagtagagctgcaaaaaggagattatttgaaagcgaagacagcgggtatggcaatactgaagtggaaactcagcagatgttacaggtagaagggcgccatgagactgaaacaccatgtagtcagtatagtggtggaagtgggggtggttgcagtcagtacagtagtggaagtgggggagagggtgttagtgaaagacacactatatgccaaacaccacttacaaatattttaaatgtactaaaaactagtaatgcaaaggcagcaatgttagcaaaatttaaagagttatacggggtgagtttttcagaattagtaagaccatttaaaagtaataaatcaacgtgttgcgattggtgtattgctgcatttggacttacacccagtatagctgacagtataaaaacactattacaacaatattgtttatatttacacattcaaagtttagcatgttcatggggaatggttgtgttactattagtaagatataaatgtggaaaaaatagagaaacaattgaaaaattgctgtctaaactattatgtgtgtctccaatgtgtatgatgatagagcctccaaaattgcgtagtacagcagcagcattatattggtataaaacaggtatatcaaatattagtgaagtgtatggagacacgccagaatggatacaaagacaaacagtattacaacatagttttaatgattgtacatttgaattatcacagatggtacaatgggcctacgataatgacatagtagacgatagtgaaattgcatataaatatgcacaattggcagacactaatagtaatgcaagtgcctttctaaaaagtaattcacaggcaaaaattgtaaaggattgtgcaacaatgtgtagacattataaacgagcagaaaaaaaacaaatgagtatgagtcaatggataaaatatagatgtgatagggtagatgatggaggtgattggaagcaaattgttatgtttttaaggtatcaaggtgtagagtttatgtcatttttaactgcattaaaaagatttttgcaaggcatacctaaaaaaaattgcatattactatatggtgcagctaacacaggtaaatcattatttggtatgagtttaatgaaatttctgcaagggtctgtaatatgttttgtaaattctaaaagccatttttggttacaaccattagcagatgccaaaataggtatgttagatgatgctacagtgccctgttggaactacatagatgacaatttaagaaatgcattggatggaaatttagtttctatggatgtaaagcatagaccattggtacaactaaaatgccctccattattaattacatctaacattaatgctggtacagattctaggtggccttatttacataatagattggtggtgtttacatttcctaatgagtttccatttgacgaaaacggaaatccagtgtatgagcttaatgataagaactggaaatcctttttctcaaggacgtggtccagattaagtttgcacgaggacgaggacaaggaaaacgatggagactctttgccaacgtttaaatgtgtgtcaggacaaaatactaacacattatgaaaatgatagtacagacctacgtgaccatatagactattggaaacacatgcgcctagaatgtgctatttattacaaggccagagaaatgggatttaaacatattaaccaccaggtggtgccaacactggctgtatcaaagaataaagcattacaagcaattgaactgcaactaacgttagaaacaatatataactcacaatatagtaatgaaaagtggacattacaagacgttagccttgaagtgtatttaactgcaccaacaggatgtataaaaaaacatggatatacagtggaagtgcagtttgatggagacatatgcaatacaatgcattatacaaactggacacatatatatatttgtgaagaagcatcagtaactgtggtagagggtcaagttgactattatggtttatattatgttcatgaaggaatacgaacatattttgtgcagtttaaagatgatgcagaaaaatatagtaaaaataaagtatgggaagttcatgcgggtggtcaggtaatattatgtcctacatctgtgtttagcagcaacgaagtatcctctcctgaaattattaggcagcacttggccaaccaccccgccgcgacccataccaaagccgtcgccttgggcaccgaagaaacacagacgactatccagcgaccaagatcagagccagacaccggaaacccctgccacaccactaagttgttgcacagagactcagtggacagtgctccaatcctcactgcatttaacagctcacacaaaggacggattaactgtaatagtaacactacacccatagtacatttaaaaggtgatgctaatactttaaaatgtttaagatatagatttaaaaagcattgtacattgtatactgcagtgtcgtctacatggcattggacaggacataatgtaaaacataaaagtgcaattgttacacttacatatgatagtgaatggcaacgtgaccaatttttgtctcaagttaaaataccaaaaactattacagtgtctactggatttatgtctatatgacaaatcttgatactgcatccacaacattactggcgtgctttttgctttgcttttgtgtgcttttgtgtgtctgcctattaatacgtccgctgcttttgtctgtgtctacatacacatcattaatactattggtattactattgtggataacagcagcctctgcgtttaggtgttttattgtatatattgtatttgtttatataccattatttttaatacatacacatgcacgctttttaattacataatgtatatgtacataatgtaattgttacatataattgttgtataccataacttactattttttcttttttattttcatatataatttttttttttgtttgtttgtttgttttttaataaactgttattacttaacaatgcgacacaaacgttctgcaaaacgcacaaaacgtgcatcggctacccaactttataaaacatgcaaacaggcaggtacatgtccacctgacattatacctaaggttgaaggcaaaactattgctgatcaaatattacaatatggaagtatgggtgtattttttggtgggttaggaattggaacagggtcgggtacaggcggacgcactgggtatattccattgggaacacggcctcccacagctacagatacacttgctcctgtaagaccccctttaacagtagatcctgtgggcccttctgatccttctatagtttctttagtggaagaaactagttttattgatgctggtgcaccaacatctgtaccttccattcccccagatgtatcaggatttagtattactacttcaactgataccacacctgctatattagatattaataatactgttactactgttactacacataataatcccactttcactgacccatctgtattgcagcctccaacacctgcagaaactggagggcattttacactttcatcatccactattagtacacataattatgaagaaattcctatggatacatttattgttagcacaaaccctaacacagtaactagtagcacacccataccagggtctcgcccagtggcacgcctaggattatatagtcgcacaacacaacaagttaaagttgtagaccctgcttttgtaaccactcccactaaacttattacatatgataatcctgcatatgaaggtatagatgtggataatacattatatttttctagtaatgataatagtattaatatagctccagatcctgactttttggatatagttgctttacataggccagcattaacctctaggcgtactggcattaggtacagtagaattggtaataaacaaacactacgtactcgtagtggaaaatctataggtgctaaggtacattattattatgattttagtactattgatcctgcagaagaaatagaattacaaactataacaccttctacatatactaccacttcacatgcagcctcacctacttctattaataatggattatatgatatttatgcagatgactttattacagatacttctacaaccccggtaccatctgtaccctctacatctttatcaggttatattcctgcaaatacaacaattccttttggtggtgcatacaatattcctttagtatcaggtcctgatatacccattaatataactgaccaagctccttcattaattcctatagttccagggtctccacaatatacaattattgctgatgcaggtgacttttatttacatcctagttattacatgttacgaaaacgacgtaaacgtttaccatattttttttcagatgtctctttggctgcctagtgaggccactgtctacttgcctcctgtcccagtatctaaggttgtaagcacggatgaatatgttgcacgcacaaacatatattatcatgcaggaacatccagactacttgcagttggacatccctattttcctattaaaaaacctaacaataacaaaatattagttcctaaagtatcaggattacaatacagggtatttagaatacatttacctgaccccaataagtttggttttcctgacacctcattttataatccagatacacagcggctggtttgggcctgtgtaggtgttgaggtaggtcgtggtcagccattaggtgtgggcattagtggccatcctttattaaataaattggatgacacagaaaatgctagtgcttatgcagcaaatgcaggtgtggataatagagaatgtatatctatggattacaaacaaacacaattgtgtttaattggttgcaaaccacctataggggaacactggggcaaaggatccccatgtaccaatgttgcagtaaatccaggtgattgtccaccattagagttaataaacacagttattcaggatggtgatatggttgatactggctttggtgctatggactttactacattacaggctaacaaaagtgaagttccactggatatttgtacatctatttgcaaatatccagattatattaaaatggtgtcagaaccatatggcgacagcttatttttttatttacgaagggaacaaatgtttgttagacatttatttaatagggctggtactgttggtgaaaatgtaccagacgatttatacattaaaggctctgggtctactgcaaatttagccagttcaaattattttcctacacctagtggttctatggttacctctgatgcccaaatattcaataaaccttattggttacaacgagcacagggccacaataatggcatttgttggggtaaccaactatttgttactgttgttgatactacacgcagtacaaatatgtcattatgtgctgccatatctacttcagaaactacatataaaaatactaactttaaggagtacctacgacatggggaggaatatgatttacagtttatttttcaactgtgcaaaataaccttaactgcagacgttatgacatacatacattctatgaattccactattttggaggactggaattttggtctacaacctcccccaggaggcacactagaagatacttataggtttgtaacatcccaggcaattgcttgtcaaaaacatacacctccagcacctaaagaagatccccttaaaaaatacactttttgggaagtaaatttaaaggaaaagttttctgcagacctagatcagtttcctttaggacgcaaatttttactacaagcaggattgaaggccaaaccaaaatttacattaggaaaacgaaaagctacacccaccacctcatctacctctacaactgctaaacgcaaaaaacgtaagctgtaagtattgtatgtatgttgaattagtgttgtttgttgtgtatatgtttgtatgtgcttgtatgtgcttgtaaatattaagttgtatgtgtgtttgtatgtatggtataataaacacgtgtgtatgtgtttttaaatgcttgtgtaactattgtgtcatgcaacataaataaacttattgtttcaacacctactaattgtgttgtggttattcattgtatataaactatatttgctacatcctgtttttgttttatatatactatattttgtagcgccagcggccattttgtagctccaaccgaattcggttgcatgctttttggcacaaaatgtgtttttttaaatagttctatgtcagcaactatggtttaaacttgtacgtttcctgcttgccatgcgtgccaaatccctgttttcctgacctgcactgcttgccaaccattccattgttttttacactgcactatgtgcaactactgaatcactatgtacattgtgtcatataaaataaatcactatgcgccaacgccttacataccgctgttaggcacatatttttggcttgttttaactaacctaattgcatatttggcataaggtttaaacttctaaggccaactaaatgtcaccctagttcatacatgaactgtgtaaaggttagtcatacattgttcatttgtaaaactgcacatgggtgtgtgcaaaccgttttaggttacacatttacaagcaacttatataataatactaaactacaataattcatgtataaaactaagggcgtaaccgaaatcggttgaaccgaaaccggttagtataaaagcagacattttatgcaccaaaagagaactgcaatgtttcaggacccacaggagcgacccagaaagttaccacagttatgcacagagctgcaaacaactatacatgatataatattagaatgtgtgtactgcaagcaacagttactgcgacgtgaggtatatgactttgcttttcgggatttatgcatagtatatagagatgggaatccatatgctgtatgtgataaatgtttaaagttttattctaaaattagtgagtatagacattattgttatagtgtgtatggaacaacattagaacagcaatacaacaaaccgttgtgtgatttgttaattaggtgtattaactgtcaaaagccactgtgtcctgaagaaaagcaaagacatctggacaaaaagcaaagattccataatataaggggtcggtggaccggtcgatgtatgtcttgttgcagatcatcaagaacacgtagagaaacccagctgtaatcatgcatggagatacacctacattgcatgaatatatgttagatttgcaaccagagacaactgatctctactgttatgagcaattaaatgacagctcagaggaggaggatgaaatagatggtccagctggacaagcagaaccggacagagcccattacaatattgtaaccttttgttgcaagtgtgactctacgcttcggttgtgcgtacaaagcacacacgtagacattcgtactttggaagacctgttaatgggcacactaggaattgtgtgccccatctgttctcagaaaccataatctacc

SEQ ID NO: 16 - DNA, 7906 bp, Homo sapiens
  source 1..7906: mol_type = genomic DNA; note = UNCseq1693
atggctgatcctgcaggtaccaatggggaagagggtacgggatgtaatggatggttttatgtagaggctgtagtggaaaaaaaaacaggggatgctatatcagatgacgagaacgaaaatgacagtgatacaggtgaagatttggtagattttatagtaaatgataatgattatttaacacaggcagaaacagagacagcacatgcgttgtttactgcacaggaagcaaaacaacatagagatgcagtacaggttctaaaacgaaagtatttgggtagtccacttagtgatattagtggatgtgtagacaataatattagtcctagattaaaagctatatgtatagaaaaacaaagtagagctgcaaaaaggagattatttgaaagcgaagacagcgggtatggcaatactgaagtggaaactcagcagatgttacaggtagaagggcgccatgagactgaaacaccatgtagtcagtatagtggtggaagtgggggtggttgcagtcagtacagtagtggaagtgggggagagggtgttagtgaaagacacactatatgccaaacaccacttacaaatattttaaatgtactaaaaactagtaatgcaaaggcagcaatgttagcaaaatttaaagagttatacggggtgagttttacagaattagtaagaccatttaaaagtaataaatcaacgtgttgcgattggtgtattgctgcatttggacttacacccagtatagctgacagtataaaaacactattacaacaatattgtttatatttacacattcaaagtttagcatgttcatggggaatggttgtgttactattagtaagatataaatgtggaaaaaatagagaaacaattgaaaaattgctgtctaaactattatgtgtgtctccaatgtgtatgatgatagagcctccaaaattgcgtagtacagcagcagcattatattggtataaaacaggtatatcaaatattagtgaagtgtatggagacacgccagaatggatacaaagacaaacagtattacaacatagttttaatgattgtacatttgaattatcacagatggtacaatgggcctacgataatgacatagtagacgatagtgaaattgcatataaatatgcacaattggcagacactaatagtaatgcaagtgcctttctaaaaagtaattcacaggcaaaaattgtaaaggattgtgcaacaatgtgtagacattataaacgagcagaaaaaaaacaaatgagtatgagtcaatggataaaatatagatgtgatagggtagatgatggaggtgattggaagcaaattgttatgtttttaaggtatcaaggtgtagagtttatgtcatttttaactgcattaaaaagatttttgcaaggcatacctaaaaaaaattgcatattactatatggtgcagctaacacaggtaaatcattatttggtatgagtttaatgaaatttctgcaagggtctgtaatatgttttgtaaattctaaaagccatttttggttacaaccattagcagatgccaaaataggtatgttagatgatgctacagtgccctgttggaactatatagatgacaatttaagaaatgcattggatggaaatttagtttctatggatgtaaagcatagaccattggtacaactaaaatgccctccattattaattacatctaacattaatgctggtacagattctaggtggccttatttacataatagattggtggtgtttacatttcctaatgagtttccatttgacgaaaacggaaatccagtgtatgagcttaatgataagaactggaaatcctttttctcaaggacgtggtccagattaagtttgcacgaggacgaggacaaggaaaacgatggagactctttgccaacgtttaaatgtgtgtcaggacaaaatactaacacattatgaaaatgatagtacagacctacgtgaccatatagactattggaaacacatgcgcctagaatgtgctatttattacaaggccagagaaatgggatttaaacatattaaccaccaggtggtgccaacgctggctgtatcaaagaataaagcattacaagcaattgaactgcaactaacgttagaaacaatatataactcacaatatagtaatgaaaagtggacattacaagacgttagccttgaagtgtatttaactgcaccaacaggatgtataaaaaaacatggatatacagtggaagtgcagtttgatggagacatatgcaatacaatgcattatacaaactggacacatatatatatttgtgaagaagcatcagtaactgtggtagagggtcaagttgactattatggtttatattatgttcatgaaggaatacgaacatattttgtgcagtttaaagatgatgcagaaaaatatagtaaaaataaagtatgggaagttcatgcgggtggtcaggtaatattatgtcctacatctgtgtttagcagcaacgaagtatcctctcctgaaattattaggcagcacttggccaaccactccgccgcgacccataccaaagccgtcgccttgggcaccgaagaaacacagacgactatccagcgaccaagatcagagccagacaccggaaacccctgccacaccactaagttgttgcacagagactcagtggacagtgctccaatcctcactgcatttaacagctcacacaaaggacggattaactgtaatagtaacactacacccatagtacatttaaaaggtgatgctaatactttaaaatgtttaagatatagatttaaaaagcattgtacattgtatactgcagtgtcgtctacatggcattggacaggacataatgtaaaacataaaagtgcaattgttacacttacatatgatagtgaatggcaacgtgaccaatttttgtctcaagttaaaataccaaaaactattacagtgtctactggatttatgtctatatgacaaatcttgatactgcatccacaacattactggcgtgctttttgctttgcttttgtgtgcttttgtgtgtctgcctattaatacgtccgctgcttttgtctgtgtctacatacacatcattaatactattggtattactattgtggataacagcagcctctgcgtttaggtgttttattgtatatattgtatttgtttatataccattatttttaatacatacacatgcacgctttttaattacataatgtatatgtacataatgtaattgttacatataattgttgtataccataacttactattttttattttttatttttatatataatttttttttttgtttgtttgtttgttttttaataaactgttatcacttaacaatgcgacacaaacgttctgcaaaacgcacaaaacgtgcatcggctacccaactttataaaacatgcaaacaggcaggtacatgtccacctgacattatacctaaggttgaaggcaaaactattgctgatcaaatattacaatatggaagtatgggtgtattttttggtgggttaggaattggaacagggtcgggtacaggcggacgcactgggtatattccattgggaacaaggcctcccacagctacagatacacttgctcctgtaagaccccctttaacagtagatcctgtgggcccttctgatccttctatagtttctttagtggaagaaactagttttattgatgctggtgcaccaacatctgtaccttccatccccccagatgtatcaggatttagtattactacttcaactgataccacacctgctatattggatattaataatactgttactactgttactacacataataatcccactttcactgacccatctgtattgcagcctccaacacctgcagaaactggagggcattttacactttcatcatccactattagtacacataattatgaagaaattcctatggatacatttattgttagcacaaaccctaacacagtaactagtagcacacccataccagggtctcgcccagtggcacgcctaggattatatagtcgcacaacacaacaagttaaagttgtagaccctgcttttgtaaccactcccactaaacttattacatatgataatcctgcatatgaaggtatagatgtggataatacattatattttcctagtaatgataatagtattaatatagctccagatcctgactttttggatatagttgctttacataggccagcattaacctctaggcgtactggcattaggtacagtagaattggtaataaacaaacactacgtactcgtagtggaaaatctataggtgctaaggtacattattattatgatttgagtactattgatcctgcagaagaaatagaattacaaactataacaccttctacatatactaccacttcgcatgcagcctcacctacttctattaataatggattatatgatatttatgcagatgactttattacagatacttctacaaccccggtaccatctgtaccctctacatctttatcaggttatattcctgcaaatacaacaattccttttggtggtgcatacaatattcctttagtatcaggtcctgatatacccattaatataactgaccaagctccttcattaattcctatagttccagggtctccacaatatacaattattgctgatgcaggtgacttttatttacatcctagttattacatgttacgaaaacgacgtaaacgtttaccatattttttttcagatgtctctttggctgcctagtgaggccactgtctacttgcctcctgtcccagtatctaaggttgtaagcacggatgaatatgttgcacgcacaaacatatattatcatgcaggaacatccagactacttgcagttggacatccctattttcctattaaaaaacctaacaataacaaaatattagttcctaaagtatcaggattacaatacagggtatttagaatacatttacctgaccccaataagtttggttttcctgacacctcattttataatccagatacacagcggctggtttgggcctgtgtaggtgttgaggtaggtcgtggtcagccattaggtgtgggcattagtggccatcctttattaaataaattggatgacacagaaaatgctagtgcttatgcagcaaatgcaggtgtggataatagagaatgtatatctatggattacaaacaaacacaattgtgtttaattggttgcaaaccacctataggggaacactggggcaaaggatccccatgtaccaatgttgcagtaaatccaggtgattgtccaccattagagttaataaacacagttattcaggatggtgatatggttgatactggctttggtgctatggactttactacattacaggctaacaaaagtgaagttccactggatatttgtacatctatttgcaaatatccagattatattaaaatggtgtcagaaccatatggcgacagcttatttttttatttacgaagggaacaaatgtttgttagacatttatttaatagggctggtgctgttggtgaaaatgtaccagacgatttatacattaaaggctctgggtctactgcaaatttagccagttcaaattattttcctacacctagtggttctatggttacctctgatgcccaaatattcaataaaccttattggttacaacgagcacagggccacaataatggcatttgttggggtaaccaactatttgttactgttgttgatactacacgcagtacaaatatgtcattatgtgctgccatatctacttcagaaactacatataaaaatactaactttaaggagtacctacgacatggggaggaatatgatttacagtttatttttcaactgtgcaaaataaccttaactgcagacgttatgacatacatacattctatgaattccactattttggaggactggaattttggtctacaaccccccccaggaggcacactagaagatacttataggtttgtaacatcccaggcaattgcttgtcaaaaacatacacctccagcacctaaagaagatccccttaaaaaatacactttttgggaagtaaatttaaaggaaaagttttctgcagacctagatcagtttcctttaggacgcaaatttttactacaagcaggattgaaggccaaaccaaaatttacattaggaaaacgaaaagctacacccaccacctcatctacctctacaactgctaaacgcaaaaaacgtaagctgtaagtattgtatgtatgttgaattagtgttgtttgttgtttatatgtttgtatgtgcttgtatgtgcttgtaaatattaagttgtatgtgtgtttgtatgtatggtataataaacacgtgtgtatgtgtttttaaatgcttgtgtaactattgtgtgatgcaacataaataaacttattgtttcaacacctactaattgtgttgtggttattcattgtatataaactatatttgctacatcctgtttttgttttatatatactatattttgtagcgccagcggccattttgtagcttcaaccgaattcggttgcatgctttttggcacaaaatgtgtttttttaaatagttctatgtcagcaactatagtttaaacttgtacgtttcctgcttgccatgcgtgccaaatccctgttttcctgacctgcactgcttgccaaccattccattgttttttacactgcactatgtgcaactactgaatcactatgtacattgtgtcatataaaataaatcactatgcgccaacgccttacataccgctgttaggcacatatttttggcttgttttaactaacctaattgcatatttggcataaggtttaaacttctaaggccaactaaatgtcaccctagttcatacataaactgtgtaaaggttagtcatacattgttcatttgtaaaactgcacatgggtgtgtgcaaaccgttttgggttacacatttacaagcaacttatataataatactaaactacaataattcatgtataaaactaagggcgtaaccgaaatcggttgaaccgaaaccggttagtataaaagcagacattttatgcaccaaaagagaactgcaatgtttcaggacccacaggagcgacccggaaagttaccacagttatgcacagagctgcaaacaactatacatgatataatattagaatgtgtgtactgcaagcaacagttactgcgacgtgaggtatatgactttgcttttcgggatttatgcatagtatatagagatgggaatccatatgctgtatgtgataaatgtttaaagttttattctaaaattagtgagtatagacattattgttatagtgtgtatggaacaacattagaacagcaatacaacaaaccgttgtgtgatttgttaattaggtgtattaactgtcaaaagccactgtgtcctgaagaaaagcaaagacatctggacaaaaagcaaagattccataatataaggggtcggtggaccggtcgatgtatgtcttgttgcagatcatcaagaacacgtagagaaacccagctgtaatcatgcatggagatacacctacattgcatgaatatatgttagatttgcaaccagagacaactgatctctactgttatgagcaattaaatgacagctcagaggaggaggatgaaatagatggtccagctggacaagcagaaccggacagagcccattacaatattgtaaccttttgttgcaagtgtgactctacgcttcggttgtgcgtacaaagcacacacgtagacattcgtactttggaagacctgttaatgggcacactaggaattgtgtgccccatctgttctcagaaaccataatctacc

SEQ ID NO: 17 - DNA, 7906 bp, Homo sapiens
  source 1..7906: mol_type = genomic DNA; note = UNCseq1697
atggctgatcctgcaggtaccaatggggaagagggtacgggatgtaatggatggttctatgtagaggctgtagtggaaaaaaaaacaggggatgctatatcagatgacgagaacgaaaatgacagtgatacaggtgaagatttggtagattttatagtaaatgataatgattatttgacacaggcagaaacagagacagcacatgcgttgtttactgcacaggaagcaaaagaacatagagatgcagtacaggttctaaaacgaaagtatttgggtagtccacttagtgatattagtgaatgtgtagacaataatattagtcctagattaaaagccatatgtatagaaaaacaaagtagagctgcaaaaaggagattatttgaaagcgaagacagcgggtatggcaatactgaagtggaaactcagcagatgttacaggtagaagggcgccatgagactgaaacaccatgtagtcagtatagtggtggaagtgggggtggtagcagtcagtatagtagtggaagtgggggagagggtgttagtgaaagacacactatatgcgaaacaccacttacaaatattttaaatgtactaaaaactagtaatgcaaaggcagcaatgctagcaaaatttaaagagttatacggggtgagttttacagaattagtaagaccatttaaaagtaataaatcaacgtgttgcgattggtgtattgctgcatttggacttacacccagtatagctgacagtataaaaacattattacaacaatattgtttatatttacacattcaaagtttagcgtgttcatggggaatggttgtgttactattagtaagatataaatgtggaaaaaatagagaaacaattgaaaaattgatgtctaaactattatgtgtgtctccaatgtgtatgatgatagagcctccaaaattgcgtagtacagcagcagcattatattggtataaaacaggtatgtcaaatattagtgaagtgtatggagacacgccagaatggatacaaagacaaacagtattacaacatagttttaatgattgtacatttgaattatcacagatggtacaatgggcctacgataatgacatagtagacgatagtgaaattgcatataaatatgcacaattggcagacactaatagtaatgcaagtgcctttttaaaaagtaattcacaggcaaaaattgtaaaggattgtgcaacaatgtgtagacattataaacgagcagaaaaaaaacaaatgagtatgagtcaatggataaaatatagatgtgatagggtagatgatggaggtgattggaagcaaattgttatgtttttaaggtatcaaggtgtagactttatgtcatttttaagtgcattaaaaaaatttctgcaaggtatacctaaaaaaaattgcatattattatatggtgcagctaacacaggtaaatcattatttggtatgagtttaatgaaattcttgcaagggtctgtaatatgttttgtaaattctaaaagccatttttggttacaaccattagcagatgccaaaataggtatgttagatgatgctacagtgccctgttggaactacatagatgacaatttaagaaatgcattggatggaaatttagtttctatggatgtaaagcatagaccattggtacaactaaaatgccctccattattaattacatctaacattaatgctggtacagattccaggtggccttatttacataatcgattggtggtgtttacatttccaaatgagtttccatttgacaaaaacggaaatccagtgtatgagcttaatgataagaactggaaatcctttttctcaaggacgtggtccagattaagtttgcacgaggacgaggacaaggaaaacgatggagactctttgccaacgtttaaatgtgtgtcaggacaaaatactaacacattatgaaaatgatagtacagacctacgtgaccatatagactattggaaacaaatgcgcctagaatgtgctatttattacaaggccagagaaatgggatttaaacatattaaccaccaggtggtgccaacactggctgtatcaaagaataaagcattacaagcaattgaactgcaactaacgttagaaacaatatataactcacaatatagtaatgaaaagtggacattacaagacgttagccttgaagtgtatttaactgcaccaacaggatgtataaaaaaacatggatatacagtggaagtgcagtttgatggagacatatgcaatacaatgcattatacaaactggaaacatatatatatttgtgaagacacatcagtaactgtggtagagggtcaagttgactattatggtatatattatgttcatgaaggaatacaaacatattttgtgcagtttaaagatgatgcagaaaaatatagtaaaaataaagtatgggaagttcatgcgggtggtcaggtaatattatgtcctacatctgtgtttagcagcgacgaagtatcctctgctgaaattactaggcagcacttggccaaccactccgccgcgacccataccaaagccgtcgccttgggcaccaaagaaacacagacgactatccagcgaccaagatcagagccagacaccggaaacccctgccacaccaacaagttgttgcacagagactccgtggacagtgctccaatcctcactgcagttaacagctcacacaaaggacggattaactgtaatagtaacactacacccatagtacatttaaaaggtgatgctaatactttaaaatgtttaagatacagatttaaaaagcattgtaaattgtatacagcagtgtcgtccacatggcattggacaggacataatgtaaaacataaaagtgcaattgttacacttacatatgatagtgaatgtcaacgtgaacaatttttgtctcaagtgaaaataccaaaaactattacagtgtctactggatttatgtctatatgacaaaccttgatactgcatccacaacattactggcgtgctttttgctttgcttttgtgtgcttttgtgtgtctgcctattaatacgtccgctgcttttgtctgtgtctacatacacatcattaatactattggtattagtattgtggataacagcagcctctgcatttaggtgttttattgtatatattgtatttgtttatataccattatttttaatacatacacatgcacgctttttaattacataatgtatatgtacataatgtaattgttacatataattgttgtataccataaattactatttttttttttttattttcatatataatttttttttttgtttatttgtgtgttttttaataaactgttattacttaacaatgcgacacaaacgttctgcaaaacgcacaaaacgtgcatcggccacccaactttataaaacatgcaaacaggcaggtacatgtccacctgacattatacctaaggttgaaggcaaaactattgctgatcaaatattacaatatggaagtatgggtgtattttttggtgggttaggaattggaacagggtctggtacaggcggacgcactgggtacattccattaggaacaaggcctcccactgctacagatacacttgctcctgtaagaccccctttaacagtagatcctgtgggcccttctgatccttctatagtttctttagtggaagaaactagttttattgatgctggtgcaccaacccctgtaccttccattcccccagatgtatcaggatttagtattacaacttcaactgataccacacctgctatattagatattaataatactgttactactgttactacacataataatcccacttttactgacccatctgtattgcagcctccaacacctgcagaaactggagggcattttacactttcatcatccactattagtacacataattatgaagaaattcctatggatacatttattgttagcacaaaccctaacacagtaactagtagcacacccataccggggtctcgcccagtggcacgcctaggattatatagtcgcacaacacaacaagttaaggttgtggaccctgcttttgtaaccgctcccactaaacttattacatatgataatcctgcatatgaaggtatagatgtggataatacattttattttcctagtaatgataatagtattaatatagctccagatcctgactttttggatatagttgctttacataggccagcattaacctctaggcgtactggcattagatacagtagaattggtaataaacaaacactacgtactcgtagtggaaaatctataggtgctaaggtacattattattatgatttaagtactattaatcctgcagaagaaatagaattacaaactataacaccttctacatatacaaccacttcccatgcagcctcaccaacttctattaataatggattatatgatatttatgcagatgactttattacagatactgttacaaccccagtaccagctataccctctacatccttatcaggttatattcctgcaaatacaacaattccttttggtggtgcatacaatattcctttagtatcaggacctgatatacctattaatacaactgaccaaactccttcattaattcctatagttccagggtctccacaatatacaattattgctgatggaggtgacttttatttacatcctagttattacatgttacgaaaacgacgtaaacgtttaccatattttttttcagatgtctctttggctgcctagtgaggccactgtctacttgcctcctgtcccagtatctaaagttgtaagcacggatgaatatgttgcacgcacaaacatatattatcatgcaggaacatccagactacttgcagttggacatccctattttcctattaaaaaacctaacaataacaaaatattagttcctaaagtatcaggattacaatacagggtatttagaatatatttacctgaccccaataagtttggttttcctgacacctcattttacaatccagatacacagcggctggtttgggcctgtgtaggtgttgaggtaggtcgtggtcagccattaggtgtgggcattagtggccatcctttattaaataaattggatgacacagaaaatgctagtgcttatgcagcaaatgcaggtgtggataatagagaatgtatatctatggattacaaacaaacacaattgtgtttaattggttgcaaaccacctataggggaacactggggcaaaggatccccatgtaacaatgttgcagtaactccaggtgattgtccaccattagagttaataaacacagttattcaggatggtgatatggttgataccggctttggtgctatggactttactacattacaggctaacaaaagtgaagttccactggatatttgtacatctatttgcaaatatccagattatattaaaatggtgtcagaaccatatggcgacagcttatttttttatttacgaagggaacaaatgtttgttagacatttatttaatagggctggtgctgttggtgaaaatgtaccagacgatttatacattaaaggctctgggtctactgcaaatttagccagttcaaattattttcctacacctagtggttctatggttacctctgatgcccaaatatttaataaaccttattggttacaacgagcacagggccacaataatggcatttgttggggtaaccaactatttgttactgttgttgatactacacgcagtacaaatatgtcattatgtgctgccatatctacttcagaacctacatataaaaatactaactttaaagagtacctacgacatggggaggaatatgatttacagtttatttttcaactgtgcaaaataaccttaactgcagacgttatgtcatacatacattctatgaattccactattttggaggactggaattttggtttacaacctcctccaggaggcacactagaagatacttataggtttgtaacatcccaggcaattgcttgtcaaaaacatacacctccagcacctaaagaagatccccttaaaaaatatactttttgggaagtaaatttaaaagaaaagttttctgcagacctagatcagtttcctttaggacgcaaatttttactacaagcaggatttaaggccaaaccaaaatttacattaggaaaacgaaaagctacacccaccacctcatctacctctacaactgctaaacgcaaaaaacgtaagctgtaagtattgtatgtatgttgaattagtgttgtttgttgtttatatgtttgtatgtgcttgtatgtgcttgtaaatattacgttgtatgtgtgtttgtatgtatggtataataaacacatgtgtatgtgtttttaaatgcttgtgtaactattgtgtcatgcaacataaataaacttattgtttcatcacctactaattgtgttgtggttattcattgtatataaactatatttgctacattttgtttttgttttatatatactatattttgtagcgccagcggccattttgtagcttcaaccgaattcggttgcatgctttttggcacaaactgtatttttttaaatagttctatgtcagcaactatagtttaaacttgtacgtttcctgcttgccatgcgtgccaaatccctgttttcctgacctgcactgcttgccaaccattccattgttttttacactgcactatgtgcaactactgaatcactatgtacattgtgtcatataaaataaattactatgcgccaacgccttaaataccgctgttaggcacatatttttggcttgttttaactcacctaattgcatagttggcataaggtttaaacttttaaggccaactaaatgtcaccttagttcatacatgaactgtgtaaaggttagtcatacattgttcatttgtaaaactgcacatgggtgtgtgcaaaccgttttgggttacacatttacaagaaacttatataataatactaaactacaataattcatgtataaaactaagggcgtaaccgaaatcggttgaaccgaaaccggttagtataaaagcagacattttatgcaccaaaagagaactgcaatgtttcaggacccacaggagcgacccagaaagctaccacatttatgcacagagctgcaaacaactatacatgatataatattagaatgtgtgtactgcaagcaacagttactgcgacgtgaggtatatgactttgcttttcgggatttatggatagtatatagagatgggaatccatatgcagtgtgtgataaatgtttaaagttttattctaaaattagtgagtatagatattattgttatagtgtgtatggaacaacattagaacagcaatacaacaaaccgttgtgtgatttgttaattaggtgtattaactgtcaaaagccactgtgtcctgaagaaaagcaaagacatctggacaaaaagcaaagattccataatataaggggtcggtggaccggtcgatgtatgtcttgttgcagatcatcgagaacacgtagagaaacccagctgtaatcatgcatggagatacacctacattgcatgaatatatgttagatttgcaaccagagacaactgatctctactgttatgagcaattaaatgacagctcagaggaggaggatgaaatagatggtccagctggacaagcagaaccggacagagcccattacaatattgtaaccttctgttgcaagtgtgactgtacgcttcggttgtgcgtacaaagcacacacgtagacatccgtacgttggaagacctgttaatgggcacactaggaattgtgtgccccatctgttctcagaaaccataatctacc

SEQ ID NO: 18 - DNA, 7906 bp, Homo sapiens
  source 1..7906: mol_type = genomic DNA; note = UNCseq1710
atggctgatcctgcaggtaccaatggggaagagggtacgggatgtaatggatggttttatgtagaggctgtagtggaaaaaaaaacaggggatgctatatcagatgacgagaacgaaaatgacagtgatacaggtgaagatttggtagattttatagtaaatgataatgattatttaacacaggcagaaacagagacagcacatgcgttgtttactgcacaggaagcaaaacaacatagagatgcagtacaggttctaaaacgaaagtatttgggtagtccacttagtgatattagtggatgtgtagacaataatattagtcctagattaaaagctatatgtatagaaaaacaaagtagagctgcaaaaaggagattatttgaaagcgaagacagcgggtatggcaatactgaagtggaaactcagcagatgttacaggtagaagggcgccatgagactgaaacaccatgtagtcagtatagtggtggaagtgggggtggttgcagtcagtacagtagtggaagtgggggagagggtgttagtgaaagacacactatatgccaaacaccacttacaaatattttaaatgtactaaaaactagtaatgcaaaggcagcaatgttagcaaaatttaaagagttatacggggtaagtttttcagaattagtaagaccatttaaaagtaataaatcaacgtgttgcgattggtgtattgctgcatttggacttacacccagtatagctgacagtataaaaacactattacaacaatattgtttatatttacacattcaaagtttagcatgttcatggggaatggttgtgttactattagtaagatataaatgtggaaaaaatagagaaacaattgaaaaattgctgtctaaactattatgtgtgtctccaatgtgtatgatgatagagcctccaaaattgcgtagtacagcagcagcattatattggtataaaacaggtatatcaaatattagtgaagtgtatggagacacgccagaatggatacaaagacaaacagtattacaacatagttttaatgattgtacatttgaattatcacagatggtacaatgggcctacgataatgacatagtagacgatagtgaaattgcatataaatatgcacaattggcagacactaatagtaatgcaagtgcctttctaaaaagtaattcacaggcaaaaattgtaaaggattgtgcaacaatgtgtagacattataaacgagcagaaaaaaaacaaatgagtatgagtcaatggataaaatatagatgtgatagggtagatgatggaggtgattggaagcaaattgttatgtttttaaggtatcaaggtgtagagtttatgtcatttttaactgcattaaaaagatttttgcaaggcatacctaaaaaaaattgcatattactatatggtgcagctaacacaggtaaatcattatttggtatgagtttaatgaaatttctgcaagggtctgtaatatgttttgtaaattctaaaagccatttttggttacaaccattagcagatgccaaaataggtatgttagatgatgctacagtgccctgttggaactacatagatgacaatttaagaaatgcattggatggaaatttagtttctatggatgtaaagcatagaccattggtacaactaaaatgccctccattattaattacatctaacattaatgctggtacagattctaggtggccttatttacataatagattggtggtgtttacatttcctaatgagtttccatttgacgaaaacggaaatccagtgtatgagcttaatgataagaactggaaatcctttttctcaaggacgtggtccagattaagtttgcacgaggacgaggacaaggaaaacgatggagactctttgccaacgtttaaatgtgtgtcaggacaaaatactaacacattatgaaaatgatagtacagacctacgtgaccatatagactattggaaacacatgcgcctagaatgtgctatttattacaaggccagagaaatgggatttaaacatattaaccaccaggtggtgccaacactggctgtatcaaagaataaagcattacaagcaattgaactgcaactaacgttagaaacaatatataactcacaatatagtaatgaaaagtggacattacaagacgttagccttgaagtgtatttaactgcaccaacaggatgtataaaaaaacatggatatacagtggaagtgcagtttgatggagacatatgcaatacaatgcattatacaaactggacacatatatatatttgtgaagaagcatcagtaactgtggtagagggtcaagttgactattatggtttatattatgttcatgaaggaatacgaacatattttgtgcagtttaaagatgatgcagaaaaatatagtaaaaataaagtatgggaagttcatgcgggtggtcaggtaatattatgtcctacatctgtgtttagcagcaacgaagtatcctctcctgaaattattaggcagcacttggccaaccactccgccgcgacccataccaaagccgtcgccttgggcaccgaagaaacacagacgactatccagcgaccaagatcagagccagacaccggaaacccctgccacaccactaagttgttgcacagagactcagtggacagtgctccaatcctcactgcatttaacagctcacacaaaggacggattaactgtaatagtaacactacacccatagtacatttaaaaggtgatgctaatactttaaaatgtttaagatatagatttaaaaagcattgtacattgtatactgcagtgtcgtctacatggcattggacaggacataatgtaaaacataaaagtgcaattgttacacttacatatgatagtgaatggcaacgtgaccaatttttgtctcaagttaaaataccaaaaactattacagtgtctactggatttatgtctatatgacaaatcttgatactgcatccacaacattactggcgtgctttttgctttgcttttgtgtgcttttgtgtgtctgcctattaatacgtccgctgcttttgtctgtgtctacatacacatcattaatactattggtattactattgtggataacagcagcctctgcgtttaggtgttttattgtatatattgtatttgtttatataccattatttttaatacatacacatgcacgctttttaattacataatgtatatgtacaaaatgtaattgttacatataattgttgtataccataacttactattttttcttttttattttcatatataatttttttttttgtttgtttgtttgttttttaataaactgttattacttaacaatgcgacacaaacgttctgcaaaacgcacaaaacgtgcatcggctacccaactttataaaacatgcaaacaggcaggtacatgtccacctgacattatacctaaggttgaaggcaaaactattgctgatcaaatattacaatatggaagcatgggtgtattttttggtgggttaggaattggaacagggtcgggtacaggcggacgcactgggtatattccattgggaacaaggcctcccacagctacagatacacttgctcctgtaagaccccctttaacagtagatcctgtgggcccttctgatccttctatagtttctttagtggaagaaactagttttattgatgctggtgcaccaacatctgtaccttccattcccccagatgtatcaggatttagtattactacttcaactgataccacacctgctatattagatattaataatactgttactactgttactacacataataatcccactttcactgacccatctgtattgcagcctccaacacctgcagaaactggagggcattttacactttcatcatccactattagtacacataattatgaagaaattcctatggatacatttattgttagcacaaaccctaacacagtaactagtagcacacccataccagggtctcgcccagtggcacgcctaggattatatagtcgcacaacacaacaagttaaagttgtagaccctgcttttataaccactcccactaaacttattacatatgataatcctgcatatgaaggtatagatgtggataatacattatatttttctagtaatgataatagtattaatatagctccagatcctgactttttggatatagttgctttacataggccagcattaacctctaggcgtactggcattaggtatagtagaattggtaataaacaaacactacgtactcgtagtggaaaatctataggtgctaaggtacattattattatgattttagtactattgatcctgcagaagaaatagaattacaaactataacaccttctacatatactaccacttcacatgcagcctcacctacttctattaataatggattatatgatatttatgcagatgactttattacagatacttctacaaccccggtaccatctgtaccctctacatctttatcaggttatattcctgcaaatacaacaattccttttggtggtgcatacaatattcctttagtatcaggtcctgatatacccattaatataactgaccaagctccttcattaattcctatagttccagggtctccacaatatacaattattgctgatgcaggtgacttttatttacatcctagttattacatgttacgaaaacgacgtaaacgtttaccatattttttttcagatgtctctttggctgcctagtgaggccactgtctacttgcctcctgtcccagtatctaaggttgtaagcacggatgaatatgttgcacgcacaaacatatattatcatgcaggaacatccagactacttgcagttggacatccctattttcctattaaaaaacctaacaataacaaaatattagttcctaaagtatcaggattacaatacagggtatttagaatacatttacctgaccccaataagtttggttttcctgacacctcattttataatccagatacacagcggctggtttgggcctgtgtaggtgttgaggtaggtcgtggtcagccattaggtgtgggcattagtggccatcctttattaaataaattggatgacacagaaaatgctagtgcttatgcagcaaatgcaggtgtggataatagagaatgtatatctatggattacaaacaaacacaattgtgtttaattggttgcaaaccacctataggggaacactggggcaaaggatccccatgtaccaatgttgcagtaaatccaggtgattgtccaccattagagttaataaacacagttattcaggatggtgatatggttgatactggctttggtgctatggactttactacattacaggctaacaaaagtgaagttccactggatatttgtacatctatttgcaaatatccagattatattaaaatggtgtcagaaccatatggcgacagcttatttttttatttacgaagggaacaaatgtttgttagacatttatttaatagggctggtactgttggtgaaaatgtaccagacgatttatacattaaaggctctgggtctactgcaaatttagccagttcaaattattttcctacacctagtggttctatggttacctctgatgcccaaatattcaataaaccttattggttacaacgagcacagggccacaataatggcatttgttggggtaaccaactatttgttactgttgttgatactacacgcagtacaaatatgtcattatgtgctgccatatctacttcagaaactacatataaaaatactaactttaaggagtacctacgacatggggaggaatatgatttacagtttatttttcaactgtgcaaaataaccttaactgcagacgttatgacatacatacattctatgaattccactattttggaggactggaattttggtctacaacctcccccaggaggcacactagaagatacttataggtttgtaacatcccaggcaattgcttgtcaaaaacatacacctccagcacctaaagaagatccccttaaaaaatacactttttgggaagtaaatttaaaggaaaagttttctgcagacctagatcagtttcctttaggacgcaaatttttactacaagcaggattgaaggccaaaccaaaatttacattaggaaaacgaaaagctacacccaccacctcatctacctctacaactgctaaacgcaaaaaacgtaagctgtaagtattgtatgtatgttgaattagtgttgtttgttgtgtatatgtttgtatgtgcttgtatgtgcttgtaaatattaagttgtatgtgtgtttgtatgtatggtataataaacacgtgtgtatgtgtttttaaatgcttgtgtaactattgtgtcatgcaacataaataaacttattgtttcaacacctactaattgtgttgtggttattcattgtatataaactatatttgctacatcctgtttttgttttatatatactatattttgtagcgccagcggccattttgtagcttcaaccgaattcggttgcatgctttttggcacaaaatgtgtttttttaaatagttctatgtcagcaactatagtttaaacttgtacgtttcctgcttgccatgcgtgccaaatccctgttttcctgacctgcactgcttgccaaccattccattgttttttacactgcactatgtgcaactactgaatcactatgtacattgtgtcatataaaataaatcactatgcgccaacgccttacataccgctgttaggcacatatttttggcttgttttaactaacctaattgcatatttggcataaggtttaaacttctaaggccaactaaatgtcaccctagttcatacatgaactgtgtaaaggttagtcatacattgttcatttgtaaaactgcacatgggtgtgtgcaaaccgttttgggttacacatttacaagcaacttatataataatactaaactacaataattcatgtataaaactaagggcgtaaccgaaatcggttgaaccgaaaccggttagtataaaagcagacattttatgcaccaaaagagaactgcaatgttccaggacccacaggagcgacccagaaagttaccacagttatgcacagagctgcaaacaactatacatgatataatattagaatgtgtgtactgcaagcaacagttactgcgacgtgaggtatatgactttgcttttcgggatttatgcatagtatatagagatgggaatccatatgctgtatgtgataaatgtttaaagttttattctaaaattagtgagtatagacattattgttatagtgtgtatggaacaacattagaacagcaatacaacaaaccgttgtgtgatttgttaattaggtgtattaactgtcaaaagccactgtgtcctgaagaaaagcaaagacatctggacaaaaagcaaagattccataatataaggggtcggtggaccggtcgatgtatgtcttgttgcagatcatcaagaacacgtagagaaacccagctgtaatcatgcatggagatacacctacattgcatgaatatatgttagatttgcaaccagagacaactgatctctactgttatgagcaattaaatgacagctcagaggaggaggatgaaatagatggtccagctggacaagcagaaccggacagagcccattacaatattgtaaccttttgttgcaagtgtgactctacgcttcggttgtgcgtacaaagcacacacgtagacattcgtactttggaagacctgttaatgggcacactaggaattgtgtgccccatctgttctcagaaaccataatctacc

SEQ ID NO: 19 - DNA, 7906 bp, Homo sapiens
  source 1..7906: mol_type = genomic DNA; note = UNCseq1712
atggctgatcctgcaggtaccaatggggaagagggtacgggatgtaatggatggttttatgtagaggctgtagtggaaaaaaaaacaggggatgctatatcagatgacgagaacgaaaatgacagtgatacaggtgaagatttggtagattttatagtaaatgataatgattatttaacacaggcagaaacagagacagcacatgcgttgtttactgcacaggaagcaaaacaacatagagatgcagtacaggttctaaaacgaaagtatttgggtagtccacttagtgatattagtggatgtgtagacaataatattagtcctagattaaaagctatatgtatagaaaaacaaagtagagctgcaaaaaggagattatttgaaagcgaagacagcgggtatggcaatactgaagtggaaactcagcagatgttacaggtagaagggcgccatgagactgaaacaccatgtagtcagtatagtggtggaagtgggggtggttgcagtcagtacagtagtggaagtgggggagagggtgttagtgaaagacacactatatgccaaacaccacttacaaatattttaaatgtactaaaaactagtaatgcaaaggcagcaatgttagcaaaatttaaagagttatacggggtgagttttacagaattagtaagaccatttaaaagtaataaatcaacgtgttgcgattggtgtattgctgcatttggacttacacccagtatagctgacagtataaaaacactattacaacaatattgtttatatttacacattcaaagtttagcatgttcatggggaatggttgtgttactattagtaagatataaatgtggaaaaaatagagaaacaattgaaaaattgctgtctaaactattatgtgtgtctccaatgtgtatgatgatagagcctccaaaattgcgtagtacagcagcagcattatattggtataaaacaggtatatcaaatattagtgaagtgtatggagacacgccagaatggatacaaagacaaacagtattacaacatagttttaatgattgtacatttgaattatcacagatggtacaatgggcctacgataatgacatagtagacgatagtgaaattgcatataaatatgcacaattggcagacactaatagtaatgcaagtgcctttctaaaaagtaattcacaggcaaaaattgtaaaggattgtgcaacaatgtgtagacattataaacgagcagaaaaaaaacaaatgagtatgagtcaatggataaaatatagatgtgatagggtagatgatggaggtgattggaagcaaattgttatgtttttaaggtatcaaggtgtagagtttatgtcatttttaactgcattaaaaagatttttgcaaggcatacctaaaaaaaattgcatattactatatggtgcagctaacacaggtaaatcattatttggtatgagtttaatgaaatttctgcaagggtctgtaatatgttttgtaaattctaaaagccatttttggttacaaccattagcagatgccaaaataggtatgttagatgatgctacagtgccctgttggaactacatagatgacaatttaagaaatgcattggatggaaatttagtttctatggatgtaaagcatagaccattggtacaactaaaatgccctccattattaattacatctaacattaatgctggtacagattctaggtggccttatttacataatagattggtggtgtttacatttcctaatgagtttccatttgacgaaaacggaaatccagtgtatgagcttaatgataagaactggaaatcctttttctcaaggacgtggtccagattaagtttgcacgaggacgaggacaaggaaaacgatggagactctttgccaacgtttaaatgtgtgtcaggacaaaatactaacacattatgaaaatgatagtacagacctacgtgaccatatagactattggaaacacatgcgcctagaatgtgctatttattacaaggccagagaaatgggatttaaacatattaaccaccaggtggtgccaacactggctgtatcaaagaataaagcattacaagcaattgaactgcaactaacgttagaaacaatatataactcacaatatagtaatgaaaagtggacattacaagacgttagccttgaagtgtatttaactgcaccaacaggatgtataaaaaaacatggatatacagtggaagtgcagtttgatggagacatatgcaatacaatgcattatacaaactggacacatatatatatttgtgaagaagcatcagtaactgtggtagagggtcaagttgactattatggtttatattatgttcatgaaggaatacgaacatattttgtgcagtttaaagatgatgcagaaaaatatagtaaaaataaagtatgggaagttcatgcgggtggtcaggtaatattatgtcctacatctgtgtttagcagcaacgaagtatcctctcctgaaattattaggcagcacttggccaaccactccgccgcgacccataccaaagccgtcgccttgggcaccgaagaaacacagacgactatccagcgaccaagatcagagccagacaccggaaacccctgccacaccactaagttgttgcacagagactcagtggacagtgctccaatcctcactgcatttaacagctcacacaaaggacggattaactgtaatagtaacactacacccatagtacatttaaaaggtgatgctaatactttaaaatgtttaagatatagatttaaaaagcattgtacattgtatactgcagtgtcgtctacatggcattggacaggacataatgtaaaacataaaagtgcaattgttacacttacatatgatagtgaatggcaacgtgaccaatttttgtctgaagttaaaataccaaaaactattacagtgtctactggatttatgtctatatgacaaatcttgatactgcatccacaacattattggcgtgctttttgctttgcttttgtgtgcttttgtgtgtctgcctattaatacgtccgctgcttttgtctgtgtctacatacacatcattaatactattggtattactattgtggataacagcagcctctgcgtttaggtgttttattgtatatattgtatttgtttatataccattatttttaatacatacacatgcacgctttttaattacataatgtatatgtacataatgtaattgttacatataattgttgtataccataacttactattttttcttttttattttcatatataatttttttttttgtttgtttgtttgttttttaataaactgttattacttaacaatgcgacacaaacgttctgcaaaacgcacaaaacgtgcatcggctacccaactttataaaacatgcaaacaggcaggtacatgtccacctgacattatacctaaggttgaaggcaaaactattgctgatcaaatattacaatatggaagtatgggtgtattttttggtgggttaggaattggaacagggtcgggtacaggcggacgcactgggtatattccattgggaacaaggcctcccacagctacagatacacttgctcctgtaagaccccctttaacagtagatcctgtgggcccttctgatccttctatagtttctttagtggaagaaactagttttattgatgctggtgcaccaacatctgtaccttccattcccccagatgtatcaggatttagtattactacttcaactgataccacacctgctatattagatattaataatactgttactactgttactacacataataatcccactttcactgacccatctgtattgcagcctccaacacctgcagaaactggagggcattttacactttcatcatccactattagtacacataattatgaagaaattcctatggatacatttattgttagcacaaaccctaacacagtaactagtagcacacccataccagggtctcgcccagtggcacgcctaggattatatagtcgcacaacacaacaagttaaagttgtagaccctgcttttgtaaccactcccactaaacttattacatatgataatcctgcatatgaaggtatagatgtggataatacattatatttttctagtaatgataatagtattaatatagctccagatcctgactttttggatatagttgctttacataggccagcattaacctctaggcgtactggcataaggtacagtagaattggtaataaacaaacactacgtactcgtagtggaaaatctataggtgctaaggtacattattattatgattttagtaccattgatcctgcagaagaaatagaattacaaactataacaccttctacatatactaccacttcacatgcagcctcacctacttctattaataatggattatatgatatttatgcagatgactttattacagatacttctacaaccccggtaccatctgtaccctctacatctttatcaggttatattcctgcaaatacaacaattccttttggtggtgcatacaatattcctttagtatcaggtcctgatatacccattaatataactgaccaagctccttcattaattcctatagttccagggtctccacaatatacaattattgctgatgcaggtgacttttatttacatcctagttattacatgttacgaaaacgacgtaaacgtttaccatattttttttcagatgtctctttggctgcctagtgaggccactgtctacttgcctcctgtcccagtatctaaggttgtaagcacggatgaatatgttgcacgcacaaacatatattatcatgcaggaacatccagactacttgcagttggacatccctattttcctattaaaaaacctaacaataacaaaatattagttcctaaagtatcaggattacaatacagggtatttagaatacatttacctgaccccaataagtttggttttcctgacacctcattttataatccagatacacagcggctggtttgggcctgtgtaggtgttgaggtaggtcgtggtcagccattaggtgtgggcattagtggccatcctttattaaataaattggatgacacagaaaatgctagtgcttatgcagcaaatgcaggtgtggataatagagaatgtatatctatggattacaaacaaacacaattgtgtttaattggttgcaaaccacctataggggaacactggggcaaaggatccccatgtaccaatgttgcagtaaatccaggtgattgtccaccattagagttaataaacacagttattcaggatggtgatatggttgatactggctttggtgctatggactttactacattacaggctaacaaaagtgaagttccactggatatttgtacatctatttgcaaatatccagattatattaaaatggtgtcagaaccatatggcgacagcttatttttttatttacgaagggaacaaatgtttgttagacatttatttaatagggctggtgctgttggtgaaaatgtaccagacgatttatacattaaaggctctgggtctactgcaaatttagccagttcaaattattttcctacacctagtggttctatggttacctctgatgcccaaatattcaataaaccttattggttacaacgagcacagggccacaataatggcatttgttggggtaaccaactatttgttactgttgttgatactacacgcagtacaaatatgttattatgtgctgccatatctacttcagaaactacatataaaaatactaactttaaggagtacctacgacatggggaggaatatgatttacagtttatttttcaactgtgcaaaataaccttaactgcagacgttatgacatacatacattctatgaattccactattttggaggactggaattttggtctacaacctcccccaggaggcacactagaagatacttataggtttgtaacatcccaggcaattgcttgtcaaaaacatacacctccagcacctaaagaagatccccttaaaaaatacactttttgggaagtaaatttaaaggaaaagttttctgcagacctagatcagtttcctttaggacgcaaatttttactacaagcaggattgaaggccaaaccaaaatttacattaggaaaacgaaaagctacacccaccacctcatctacctctacaactgctaaacgcaaaaaacgtaagctgtaagtattgtatgtatgttgaattagtgttgtttgttgtttatatgtttgtatgtgcttgtatgtgcttgtaaatattaagttgtatgtgtgtttgtatgtatggtataataaacacgtgtgtatgtgtttttaaatgcttgtgtaactattgtgtcatgcaacataaataaacttattgtttcaacacctactaattgtgttgtggttattcattgtatataaactatatttgctacatcctgtttttgttttatatatactatattttgtagcgccagcggccattttgtagcttcaaccgaattcggttgcatgctttttggcacaaaatgtgtttttttaaatagttctatgtcagcaactatagtttaaacttgtacgtttcctgcttgccatgcgtgccaaatccctgttttcctgacctgcactgcttgccaaccattccattgttttttacactgcactatgtgcaactactgaatcactatgtacattgtgtcatataaaataaatcactatgcgccaacgccttacataccgctgttaggcacatatttttggcttgttttaactaacctaattgcatatttggcataaggtttaaacttctaaggccaactaaatgtcaccctagttcatacatgaactgtgtaaaggttagtcatacattgttcatttgtaaaactgcacatgggtgtgtgcaaaccgttttgggttacacatttacaagcaacttatataataatactaaactacaataattcatgtataaaactaagggcgtaaccgaaatcggttgaaccgaaaccggttagtataaaagcagacattttatgcaccaaaagagaactgcaatgtttcaggacccacaggagcgacccagaaagttaccacagttatgcacagagctgcaaacaactatacatgatataatattagaatgtgtgtactgcaagcaacagttactgcgacgtgaggtatatgactttgctttttgggatttatgcatagtatatagagatgggaatccatatgctgtatgtgataaatgtttaaagttttattctaaaattagtgagtatagacattattgttatagtgtgtatggaacaacattagaacagcaatacaacaaaccgttgtgtgatttgttaattaggtgtattaactgtcaaaagccactgtgtcctgaagaaaagcaaagacatctggacaaaaagcaaagattccataatataaggggtcggtggaccggtcgatgtatgtcttgttgcagatcatcaagaacacgtagagaaacccagctgtaatcatgcatggagatacacctacattgcatgaatatatgttagatttgcaaccagagacaactgatctctactgttatgagcaattaaatgacagctcagaggaggaggatgaaatagatggtccagctggacaagcagaaccggacagagcccattacaatattgtaaccttttgttgcaagtgtgactctacgcttcggttgtgcgtacaaagcacacacgtagacattcgtactttggaagacctgttaatgggcacactaggaattgtgtgccccatctgttctcagaaaccataatctacc

SEQ ID NO: 20 - DNA, 7906 bp, Homo sapiens
  source 1..7906: mol_type = genomic DNA; note = UNCseq1742
atggctgatcctgcaggtaccaatggggaagagggtacgggatgtaatggatggttttatgtagaggctgtagtggaaaaaaaaacaggggatgctatatcagatgacgagaacgaaaatgacagtgatacaggtgaagatttggtagattttatagtaaatgataatgattatttaacacaggcagaaacagagacagcacatgcgttgtttactgcacaggaagcaaaacaacatagagatgcagtacaggttctaaaacgaaagtatttgggtagtccacttagtgatattagtggatgtgtagacaataatattagtcctagattaaaagctatatgtatagaaaaacaaagtagagctgcaaaaaggagattatttgaaagcgaagacagcgggtatggcaatactgaagtggaaactcagcagatgttacaggtagaagggcgccatgagactgaaacaccatgtagtcagtatagtggtggaagtgggggtggttgcagtcagtacagtagtggaagtgggggagagggtgttagtgaaagacacactatatgccaaacaccacttacaaatattttaaatgtactaaaaactagtaatgcaaaggcagcaatgttagcaaaatttaaagagttatacggggtgagttttacagaattagtaagaccatttaaaagtaataaatcaacgtgttgcgattggtgtattgctgcatttggacttacacccagtatagctgacagtataaaaacactattacaacaatattgtttatatttacacattcaaagtttagcatgttcatggggaatggttgtgttactattagtaagatataaatgtggaaaaaatagagaaacaattgaaaaattgctgtctaaactattatgtgtgtctccaatgtgtatgatgatagagcctccaaaattgcgtagtacagcagcagcattatattggtataaaacaggtatatcaaatattagtgaagtgtatggagacacgccagaatggatacaaagacaaacagtattacaacatagttttaatgattgtacatttgaattatcacagatggtacaatgggcctacgataatgacatagtagacgatagtgaaattgcatataaatatgcacaattggcagacactaatagtaatgcaagtgcctttctaaaaagtaattcacaggcaaaaattgtaaaggattgtgcaacaatgtgtagacattataaacgagcagaaaaaaaacaaatgagtatgagtcaatggataaaatatagatgtgatagggtagatgatggaggtgattggaagcaaattgttatgtttttaaggtatcaaggtgtagagtttatgtcatttttaactgcattaaaaagatttttgcaaggcatacctaaaaaaaattgcatattactatatggtgcagctaacacaggtaaatcattatttggtatgagtttaatgaaatttctgcaagggtctgtaatatgttttgtaaattctaaaagccatttttggttacaaccattagcagatgccaaaataggtatgttagatgatgctacagtgccctgttggaactatatagatgacaatttaagaaatgcattggatggaaatttagtttctatggatgtaaagcatagaccattggtacaactaaaatgccctccattattaattacatctaacattaatgctggtacagattctaggtggccttatttacataatagattggtggtgtttacatttcctaatgagtttccatttgacgaaaacggaaatccagtgtatgagcttaatgataagaactggaaatcctttttctcaaggacgtggtccagattaagtttgcacgaggacgaggacaaggaaaacgatggagactctttgccaacgtttaaatgtgtgtcaggacaaaatactaacacattatgaaaatgatagtacagacctacgtgaccatatagactattggaaacacatgcgcctagaatgtgctatttattacaaggccagagaaatgggatttaaacatattaaccaccaggtggtgccaacgctggctgtatcaaagaataaagcattacaagcaattgaactgcaactaacgttagaaacaatatataactcacaatatagtaatgaaaagtggacattacaagacgttagccttgaagtgtatttaactgcaccaacaggatgtataaaaaaacatggatatacagtggaagtgcagtttgatggagacatatgcaatacaatgcattatacaaactggacacatatatatatttgtgaagaagcatcagtaactgtggtagagggtcaagttgactattatggtttatattatgttcatgaaggaatacgaacatattttgtgcagtttaaagatgatgcagaaaaatatagtaaaaataaagtatgggaagttcatgcgggtggtcaggtaatattatgtcctacatctgtgtttagcagcaacgaagtatcctctcctgaaactattaggcagcacttggccaaccactccgccgcgacccataccaaagccgtcgccttgggcaccgaagaaacacagacgactatccagcgaccaagatcagagccagacaccggaaacccctgccacaccactaagttgttgcacagagactcagtggacagtgctccaatcctcactgcatttaacagctcacacaaaggacggattaactgtaatagtaacactacacccatagtacatttaaaaggtgatgctaatactttaaaatgtttaagatatagatttaaaaagcattgtaaattgtatactgcagtgtcgtctacatggcattggacaggacataatgtaaaacataaaagtgcaattgttacacttacatatgatagtgaatggcaacgtgaccaatttttgtctcaagttaaaataccaaaaactattacagtgtctactggatttatgtctatatgacaaatcttgatactgcatccacaacattactggcgtgctttttgctttgcttttgtgtgcttttgtgtgtctgcctattaatacgtccgctgcttttgtctgtgtctacatacacatcattaataatattggtattactattgtggataacagcagcctctgcgtttaggtgttttattgtatatattatatttgtttatataccattatttttaatacatacacatgcacgctttttaattacataatgtatatgtacataatgtaattgttacatataattgttgtataccataacttactattttttcttttttattttcatatataatttttttttttgtttgtttgtttgttttttaataaactgttattacttaacaatgcgacacaaacgttctgcaaaacgcacaaaacgtgcatcggctacccaactttataaaacatgcaaacaggcaggtacatgtccacctgacattatacctaaggttgaaggcaaaactattgctgatcaaatattacaatatggaagtatgggtgtattttttggtgggttaggaattggaacagggtcgggtacaggcggacgcactgggtatattccattgggaacaaggcctcccacagctacagatacacttgctcctgtaagaccccctttaacagtagatcctgtgggcccttctgatccttctatagtttctttagtggaagaaactagttttattgatgctggtgcaccaacatctgtaccttccattcccccagatgtatcaggatttagtattactacttcaactgataccacacctgctatattagatattaataatactgttactactgttactacacataataatcccactttcactgacccatctgtattgcagcctccaacacctgcagaaactggagggcattttacactttcatcatccactattagtacacataattatgaagaaattcctatggatacatttattgttagcacaaaccctaacacagtaactagtagcacacccataccagggtctcgcccagtggcacgcctaggattatatagtcgcacaacacaacaagttaaagttgtagaccctgcttttgtaaccactcccactaaacttattacatatgataatcctgcatatgaaggtatagatgtggataatacattatattttcctagtaatgataatagtattaatatagctccagatcctgactttttggatatagttgctttacataggccagcattaacctctaggcgtactggcattaggtacagtagaattggtaataaacaaacactacgtactcgtagtggaaaatctataggtgctaaggtacattattattatgatttgagtactattgatcctgcagaagaaatagaattacaaaccataacaccttctacatatactaccacttcacatgcagcctcacctacttctattaataatggattatatgatatttatgcagatgactttattacagatacttctacaaccccggtaccatctgtaccctctacatctttatcaggttatattcctgcaaatacaacaattccttttggtggtgcatacaatattcctttagtatcaggtcctgatatacccattaatataactgaccaagctccttcattaattcctatagttccagggtctccacaatatacaattattgctgatgcaggtgacttttatttacatcctagttattacctgttacgaaaacgacgtaaacgtttaccatattttttttcagatgtctctttggctgcctagtgaggccactgtctacttgcctcctgtcccagtatctaaggttgtaagcacggatgaatatgttgcacgcacaaacatatattatcatgcaggaacatccagactacttgcagttggacatccctattttcctattaaaaaacctaacaataacaaaatattagttcctaaagtatcaggattacaatacagggtatttagaatacatttacctgaccccaataagtttggttttcctgacacctcattttataatccagatacacagcggctggtttgggcctgtgtaggtgttgaggtaggtcgtggtcagccattaggtgtgggcattagtggccatcctttattaaataaattggatgacacagaaaatgctagtgcttatgcagcaaatgcaggtgtggataatagagaatgtatatctatggattacaaacaaacacaattgtgtttaattggttgcaaaccacctataggggaacactggggcaaaggatccccatgtaccaatgttgcagtaaatccaggtgattgtccaccattagagttaataaacacagttattcaggatggtgatatggttgatactggctttggtgctatggactttactacattacaggctaacaaaagtgaagttccactggatatttgtacatctatttgcaaatatccagattatattaaaatggtgtcagaaccatatggcgacagcttatttttttatttacgaagggaacaaatgtttgttagacatttatttaatagggctggtgctgttggtgaaaatgtaccagacgatttatacattaaaggctctgggtctactgcaaatttagccagttcaaattattttcctacacctagtggttctatggttacctctgatgcccaaatattcaataaaccttattggttacaacgagcacagggccacaataatggcatttgttggggtaaccaactatttgttactgttgttgatactacacgcagtacaaatatgtcattatgtgctgccatatctacttcagaaactacatataaaaatactaactttaaggagtacctacgacatggggaggaatatgatttacagtttatttttcaactgtgcaaaataaccttaactgcagacgttatgacatacatacattctatgaattccactattttggaggactggaattttggtctacaacctcccccaggaggcacactagaagatacttataggtttgtaacatcccaggcaattgcttgtcaaaaacatacacctccagcacctaaagaagatccccttaaaaaatacactttttgggaagtaaatttaaaggaaaagttttctgcagacctagatcagtttcctttaggacgcaaatttttactacaagcaggattgaaggccaaaccaaaatttacattaggaaaacgaaaagctacacccaccacctcatctacctctacaactgctaaacgcaaaaaacgtaagctgtaagtattgtatgtatgttgaattagtgttgtttgttgtttatatgtttgtatgtgcttgtatgtgcttgtaaatattaagttgtatgtgtgtttgtatgtatggtataataaacacgtgtgtatgtgttttgaaatgcttgtgtaactattgtgtcatgcaacataaataaacttattgtttcaacacctactaattgtgttgtggttattcattgtatataaactatatttgctacatccagtttttgttttatatatactatattttgtagcgccagcggccattttgtagcttcaaccgaattcggttgcatgctttttggcacaaaatgtgtttttttaaatagttctatgtcagcaactatagtttaaacttgtacgtttcctgcttgccatgcgtgccaaatccctgttttcctgacctgcactgcttgccaaccattccattgttttttacactgcactatgtgcaactactgaatcactatgtacattgtgtcatataaaataaatcactatgcgccaacgccttacataccgctgttaggcacatatttgtggcttgttttaactaacctaattgcatatttggcataaggtttaaacttctaaggccaactaaatgtcaccctagttcatacatgaactgtgtaaaggttagtcatacattgttcatttgtaaaactgcacatgggtgtgtgcaaaccgttttgggttacacatttacaagcaacttatataataatactaaactacaataattcatgtataaaactaagggcgtaaccgaaatcggttgaaccgaaaccggttagtataaaagcagacattttatgcaccaaaagagaactgcaatgtttcaggacccacaggagcgacccagaaagttaccacagttatgcacggagctgcaaacaactatacatgatataatattagaatgtgtgtactgcaagcaacagttactgcgacgtgaggtatatgactttgcttttcgggatttatgcatagtatatagagatgggaatccatatgctgtatgtgataaatgtttaaagttttattctaaaattagtgagtatagacattattgttatagtttgtatggaacaacattagaacagcaatacaacaaaccgttgtgtgatttgttaattaggtgtattaactgtcaaaagccactgtgtcctgaagaaaagcaaagacatctggacaaaaagcaaagattccataatataaggggtcggtggaccggtcgatgtatgtcttgttgcagatcatcaagaacacgtagagaaacccagctgtaatcatgcatggagatacacctacattgcatgaatatatgttagatttgcaaccagagacaactgatctctactgttatgagcaattaaatgacagctcagaggaggaggatgaaatagatggtccagctggacaagcagaaccggacagagcccattacaatattgtaaccttttgttgcaagtgtgactctacgcttcggttgtgcgtacaaagcacacacgtagacattcgtactttggaagacctgttaatgggcacactaggaattgtgtgccccatctgttctcagaaaccataatctacc

SEQ ID NO: 21 - DNA, 7906 bp, Homo sapiens
  source 1..7906: mol_type = genomic DNA; note = UNCseq1743
atggctgatcctgcaggtaccaatggggaagagggtacgggatgtaatggatggttttatgtagaggctgtagtggaaaaaaaaacaggggatgctatatcagatgacgagaacgaaaatgacagtgatacaggtgaagatttggtagattttatagtaaatgataatgattatttaacacaggcagaaacagagacagcacatgcgttgtttactgcacaggaagcaaaacaacatagagatgcagtacaggttctaaaacgaaagtatttgggtagtccacttagtgatattagtggatgtgtagacaataatattagtcctagattaaaagctatatgtatagaaaaacaaagtagagctgcaaaaaggagattatttgaaagcgaagacagcgggtatggcaatactgaagtggaaactcagcagatgttacaggtagaagggcgccatgagactgaaacaccatgtagtcagtatagtggtggaagtgggggtggttgcagtcagtacagtagtggaagtgggggagagggtgttagtgaaagacacactatatgccaaacaccacttacaaatattttaaatgtactaaaaactagtaatgcaaaggcagcaatgttagcaaaatttaaagagttatacggggtgagtttttcagaattagtaagaccatttaaaagtaataaatcaacgtgttgcgattggtgtattgctgcattcggacttacacccagtatagctgacagtataaaaacactattacaacaatattgtttatatttacacattcaaagtttagcatgttcatggggaatggttgtgttactattagtaagatataaatgtggaaaaaatagagaaacaattgaaaaattgctgtctaaactattatgtgtgtctccaatgtgtatgatgatagagcctccaaaattgcgtagtacagcagcagcattatattggtataaaacaggtatatcaaatattagtgaagtgtatggagacacgccagaatggatacaaagacaaacagtattacaacatagttttaatgattgtacatttgaattatcacagatggtacaatgggcctacgataatgacatagtagacgatagtgaaattgcatataaatatgcacaattggcagacactaatagtaatgcaagtgcctttctaaaaagtaattcacaggcaaaaattgtaaaggattgtgcaacaatgtgtagacattataaacgagcagaaaaaaaacaaatgagtatgagtcaatggataaaatatagatgtgatagggtagatgatggaggtgattggaagcaaattgttatgtttttaaggtatcaaggtgtagagtttatgtcatttttaactgcattaaaaagatttttgcaaggcatacctaaaaaaaattgcatattactatatggtgcagctaacacaggtaaatcattatttggtatgagtttaatgaaatttctgcaagggtctgtaatatgttttgtaaattctaaaagccatttttggttacaaccattagcagatgccaaaataggtatgttagatgatgctacagtgccctgttggaactacatagatgacaatttaagaaatgcattggatggaaatttagtttctatggatgtaaagcatagaccattggtacaactaaaatgccctccattattaattacatctaacattaatgctggtacagattctaggtggccttatttacataatagattggtggtgtttacatttcctaatgagtttccatttgacgaaaacggaaatccagtgtatgagcttaatgataagaactggaaatcctttttctcaaggacgtggtccagattaagtttgcacgaggacgaggacaaggaaaacgatggagactctttgccaacgtttaaatgtgtgtcaggacaaaatactaacacattatgaaaatgatagtacagacctacgtgaccatatagactattggaaacacatgcgcctagaatgtgctatttattacaaggccagagaaatgggatttaaacatattaaccaccaggtggtgccaacactggctgtatcaaagaataaagcattacaagcaattgaactgcaactaacgttagaaacaatatataactcacaatatagtaatgaaaagtggacattacaagacgttagccttgaagtgtatttaactgcaccaacaggatgtataaaaaaacatggatatacagtggaagtgcagtttgatggagacatatgcaatacaatgcattatacaaactggacacatatatatatttgtgaagaagcatcagtaactgtggtagagggacaagttgactattatggtttatattatgttcatgaaggaatacgaacatattttgtgcagtttaaagatgatgcagaaaaatatagtaaaaataaagtatgggaagttcatgcgggtggtcaggtaatattatgtcctacatctgtgtttagcagcaacgaagtatcctctcctgaaattattaggcagcacttggccaaccaccccgccgcgacccataccaaagccgtcgccttgggcaccgaagaaacacagacgactatccagcgaccaagatcagagccagacaccggaaacccctgccacaccactaagttgttgcacagagactcagtggacagtgctccaatcctcactgcatttaacagcgcacacaaaggacggattaactgtaatagtaacactacacccatagtacatttaaaaggtgatgctaatactttaaaatgtttaagatatagatttaaaaagcattgtacattgtatactgcagtgtcgtctacatggcattggacaggacataatgtaaaacataaaagtgcaattgttacacttacatatgatagtgaatggcaacgtgaccaatttttgtctcaagttaaaataccaaaaactattacagtgtctactggatttatgtctatatgacaaatcttgatactgcatccacaacattactggcgtgctttttgctttgcttttgtgtgcttttgtgtgtctgcctattaatacgtccgctgcttttgtctgtgtctacatacacatcattaataatattggtattactattgtggataacagcagcctctgcgtttaggtgttttattgtatatattatatttgtttatataccattatttttaatacatacacatgcacgctttttaattacataatgtatatgtacataatgtaattgttacatataattgttgtataccataacttactattttttcttttttattttcatatataatttttttttgtgtttgtttgtttgttttttaataaactgttatcacttaacaatgcgacacaaacgttctgcaaaacgcacaaaacgtgcatcggctacccaactgtataaaacatgcaaacaggcaggtacatgtccacctgacattatacctaaggttgaaggcaaaactattgctgatcaaatattacaatatggaagtatgggtgtattttttggtgggttaggaattggcacagggtcgggtacaggcggacgcactgggtatattccattgggaacaaggcctcccacagctacagatacacttgctcctgtaagaccccctttaacagtagatcctgtgggcccttctgatccttctatagtttctttagtggaagaaactagttttattgatgctggtgcaccaacatctgtaccttccattcccccagatgtatcaggatttagtattactacttcaactgataccacacctgctatattagatattaataatactgttactactgttactacacataataatcccactttcactgacccatctgtattgcagcctccaacacctgcagaaactggagggcattttacactttcatcatccactattagtacacataattatgaagaaattcctatggatacatttattgttagcacaaaccctaacacagtaactagtagcacacccataccagggtctcgcccagtggcacgcctaggattatatagtcgcacaacacaacaagttaaagttgtagaccctgcttttgtaaccactcccactaaacttattacatatgataatcctgcatatgaaggtatagatgtggataatacattatatttttctagtaatgataatagtattaatatagctccagatcctgactttttggatatagttgctttacataggccagcattaacctctaggcgtactggcattaggtacagtagaattggtaataaacaaacactacgtactcgtagtggaaaatctataggtgctaaggtacattattattatgatttcagtactattgatcctgcagaagaaatagaattacaaactataacaccttctacatatactaccacttcacatgcagcctcacctacttctattaataatggattatatgatatttatgcagatgactttattacagatacttctacaaccccggtaccatctgtaccctctacatctttatcaggttatattcctgcaaatacaacaattccttttggtggtgcatacaatattcctttagtatcaggtcctgatatacccattaatataactgaccaagctccttcattaattcctatagttccagggtctccacaatatacaattattgctgatgcaggtgacttttatttacatcctagttattacatgttacgaaaacgacgtaaacgtttaccatattttttttcagatgtctctttggctgcctagtgaggccactgtctacttgcctcctgtcccagtatctaaggttgtaagcacggatgaatatgttgcacgcacaaacatatattatcatgcaggaacatccagactacttgcagttggacatccctattttcctattaaaaaacctaacaataacaaaatattagttcctaaagtatcaggattacaatacagggtatttagaatacatttacctgaccccaataagtttggttttcctgacacctcattttataatccagatacacagcggctggtttgggcctgtgtaggtgttgaggtaggtcgtggtcagccattaggtgtgggcattagtggccatcctttattaaataaattggatgacacagaaaatgctagtgcttatgcagcaaatgcaggtgtggataatagagaatgtatatctatggattacaaacaaacacaattgtgtttaattggttgcaaaccacctataggggaacactggggcaaaggatccccatgtaccaatgttgcagtaaatccaggtgattgtccaccattagagttaataaacacagttattcaggatggtgatatggttgatactggctttggtgctatggactttactacattacaggctaacaaaagtgaagttccactggatatttgtacatctatttgcaaatatccagattatattaaaatggtgtcagaaccatatggcgacagcttatttttttatttacgaagggaacaaatgtttgttagacatttatttaatagggctggtactgttggtgaaaatgtaccagacgatttatacattaaaggctctgggtctactgcaaatttagccagttcaaattattttcctacacctagtggttctatggttacctctgatgcccaaatattcaataaaccttattggttacaacgagcacagggccacaataatggcatttgttggggtaaccaactatttgttactgttgttgatactacacgcagtacaaatatgtcattatgtgctgccatatctacttcagaaactacatataaaaatactaactttaaggagtacctacgacatggggaggaatatgatttacagtttatttttcaactgtgcaaaataaccttaactgcagacgttatgacatacatacattctatgaattccactattttggaggactggaattttggtctacaacctcccccaggaggcacactagaagatacttataggtttgtaacatcccaggcaattgcttgtcaaaaacatacacctccagcacctaaagaagatccccttaaaaaatacactttttgggaagtaaatttaaaggaaaagttttctgcagacctagatcagtttcctttaggacgcaaatttttactacaagcaggattgaaggccaaaccaaaatttacattaggaaaacgaaaagctacacccaccacctcatctacctctacaactgctaaacgcaaaaaacgtaagctgtaagtattgtatgtatgttgaattagtgttgtttgttgtgtatatgtttgtatgtgcttgtatgtgcttgtaaatattaagttgtatgtgtgtttgtatgtatggtataataaacacgtgtgtatgtgtttttaaatgcttgtgtaactattgtgtcatgcaacataaataaacttattgtttcaacacctactaattgtgttgtggttattcattgtatataaactatatttgctacatcctgtttttgttttatatatactatattttgtagcgccagcggccattttgtagcttcaaccgaattcggttgcatgctttttggcacaaaatgtgtttttttaaatagttctatgtcagcaactatggtttaaacttgtacgtttcctgcttgccatgcgtgccaaatccctgttttcctgacctgcactgcttgccaaccattccattgttttttacactgcactatgtgcaactactgaatcactatgtacattgtgtcatataaaataaatcactatgcgccaacgccttacataccgctgttaggcacatatttttggcttgttttaactaacctaattgcatatttggcataaggtttaaacttctaaggccaactaaatgtcaccctagttcatacatgaactgtgtaaaggttagtcatacattgttcatttgtaaaactgcacatgggtgtgtgcaaaccgttttgggttacacatttacaagcaacttatataataatactaaactacaataattcatgtataaaactaagggcgtaaccgaaatcggttgaaccgaaaccggttagtataaaagcagacattttatgcaccaaaagagaactgcaatgtttcaggacccacaggagcgacccagaaagttaccacagttatgcacagagctgcaaacaactatacatgatataatattagaatgtgtgtactgcaagcaacagttactgcgacgtgaggtatatgactttgcttttcgggatttatgcatagtatatagagatgggaatccatatgctgtatgtgataaatgtttaaagttttattctaaaattagtgagtatagacattattgttatagtttgtatggaacaacattagaacagcaatacaacaaaccgttgtgtgatttgttaattaggtgtattaactgtcaaaagccactgtgtcctgaagaaaagcaaagacatctggacaaaaagcaaagattccataatataaggggtcggtggaccggtcgatgtatgtcttgttgcagatcatcaagaacacgtagagaaacccagctgtaatcatgcatggagatacacctacattgcatgaatatatgttagatttgcaaccagagacaactgatctctactgttatgagcaattaaatgacagctcagaggaggaggatgaaatagatggtccagctggacaagcagaaccggacagagcccattacaatattgtaaccttttgttgcaagtgtgactctacgcttcggttgtgcgtacaaagcacacacgtagacattcgtactttggaagacctgttaatgggcacactaggaattgtgtgccccatctgttctcagaaaccataatctacc

SEQ ID NO: 22 - DNA, 7906 bp, Homo sapiens
  source 1..7906: mol_type = genomic DNA; note = UNCseq1750
atggctgatcctgcaggtaccaatggggaagagggtacgggatgtaatggatggttttatgtagaggctgtagtggaaaaaaaaacaggggatgctatatcagatgacgagaacgaaaatgacagtgatacaggtgaagatctggtagattttatagtaaatgataatgattatttgacacaggcagaaacagagacagcacatgcgttgtttactgcacaggaagcaaaagaacatagagatgcagtacaggttctaaaacgaaagtatttgggtagtccacttagtgatattagtgaatgtgtagacaataatattagtcctagattaaaagccatatgtatagaaaaacaaagtagagctgcaaaaaggagattatttgaaagcgaagacagcgggtatggcaatactgaagtggaaactcagcagatgttacaggtagaagggcgccatgagactgaaacaccatgtagtcagtatagtggtggaagtgggggtggtagcagtcagtatagtagtggaagtgggggagagggtgttagtgaaagacacactatatgcgaaacaccacttacaaatattttaaatgtactaaaaactagtaatgcaaaggcagcaatgctagcaaaatttaaagagttatacggggtgagttttacagaattagtaagaccatttaaaagtaataaatcaacgtgttgcgattggtgtattgctgcatttggacttacacccagtatagctgacagtataaaaacattattacaacaatattgtttatatttacacattcaaagtttagcgtgttcatggggaatggttgtgttactattagtaagatataaatgtggaaaaaatagagaaacaattgaaaaattgatgtctaaactattatgtgtgtctccaatgtgtatgatgatagagcctccaaaattgcgtagtacagcagcagcattatattggtataaaacaggtatgtcaaatattagtgaagtgtatggagacacgccagaatggatacaaagacaaacagtattacaacatagttttaatgattgtacatttgaattatcacagatggtacaatgggcctacgataatgacatagtagacgatagtgaaattgcatataaatatgcacaattggcagacactaatagtaatgcaagtgcctttttaaaaagtaattcacaggcaaaaattgtaaaggattgtgcaacaatgtgtagacattataaacgagcagaaaaaaaacaaatgagtatgagtcaatggataaaatatagatgtgatagggtagatgatggaggtgattggaagcaaattgttatgtttttaaggtatcaaggtgtagactttatgtcatttttaactgcattaaaaaaatttctgcaaggcatacctaaaaaaaattgcatattattatatggtgcagctaacacaggtaaatcattatttggtatgagtttaatgaaatttctgcaagggtctgtaatatgttttgtaaattccaaaagccatttttggttacaaccattagcagatgccaaaataggtatgttagatgatgctacagtgccctgttggaactacatagatgacaatttaagaaatgcattggatggaaatttagtttctatggatgtaaagcatagaccattggtacaactaaaatgccctccattattaattacatctaacattaatgctggtacagattccaggtggccttatttacataatcgattggtggtgtttacatttcctaatgagtttccatttgacaaaaacggaaatccagtgtatgagcttaatgataagaactggaaatcctttttctcaaggacgtggtccagattaagtttgcacgaggacgaggacaaggaaaacgatggagactctttgccaacgtttaaatgtgtgtcaggacaaaatactaacacattatgaaaatgatagtacagacctacgtgaccatatagactattggaaacaaatgcgcctagaatgtgctatttattacaaggccagagaaatgggatttaaacatattaaccaccaggtggtgccaacactggctgtatcaaagaataaagcattacaagcaattgaactgcaactaacgttagaaacaatatataactcacaatatagtaatgaaaagtggacattacaagacgttagccttgaagtgtatttaactgcaccaacaggatgtataaaaaaacatggatatacagtggaagtgcagtttgatggagacatatgcaatacaatgcattatacaaactggacacatatatatatttgtgaagaaacatcagtaactgtggtagagggtcaagttgactattatggtatatattatgttcatgaaggaatacaaacatattttgtgcagtttaaagatgatgcagaaaaatatagtaaaaataaagtatgggaagttcatgcgggtggtcaggtaatattatgtcctacatctgtgtttagcagcgacgaagtatcctctgctgaaattattaggcagcacttggccaaccactccgccgcgacccataccaaagccgtcgccttgggcaccgaagaaacacagacgactatccagcgaccaagatcagagccagacaccggaaacccctgccacaccactaagttgttgcacagagactccgtggacagtgctccaatcctcactgcagttaacagctcacacaaaggacggattaactgtaatagtaacactacacccatagtacatttaaaaggtgatgctaatactttaaaatgtttaagatatagatttaaaaagcattgtaaattgtatacagcagtgtcgtccacatggcattggacaggacataatgtaaaacataaaagtgcaattgttacacttacatatgatagtgaatgtcaacgtgaccaatttttgtctcaagtgaaaataccaaaaactattacagtgtctactggatttatgtctatatgacaaaccttgatactgcatccacaacattactggcgtgctttttgctttgcttttgtgtgcttttgtgtgtctgcctattaatacgtccgctgcttttgtctgtgtctacatacgcatcattaatactattggtattagtattgtggataacagcagcctctgcatttaggtgttttattgtatatattgtatttgtttatataccattatttttaatacatacacatgcacgcttcttaattacataatgtatatgtacataatgtaattgttacatataattgttgtataccataaattactatttttttttttttattttcatatataatttttttttttgtttatttgtgtgttttttaataaactgttattacttaacaatgcgacacaaacgttctgcaaaacgcacaaaacgtgcatcggccacccaactttataaaacatgcaaacaggcaggtacatgtccacctgacattatacctaaggttgaaggcaaaactattgctgatcaaatattacaatatggaagtatgggtgtattttttggtgggttgggaattggaacagggtctggtacaggcggacgcactgggtacattccattaggaacaaggcctcccacagctacagatacacttgctcctgtaagaccccctttaacagtagatcctgtgggcccttccgatccttctatagtttctttagtggaagaaactagttttattgatgctggtgcaccaacacctgtaccttccattcccccagatgtatcaggatttagtattactacttcaactgataccacacctgctatattagatattaataatactgttactactgttactacacataataatcccactttcactgacccatctgtattgcagcctccaacacctgcagaaactggagggcattttacactttcatcatccactattagtacacataattatgaagaaattcctatggatacatttattgttagcacaaaccctaacacagtaactagtagcacacccataccagggtctcgcccagtggcacgcctaggattatatagtcgcacaacacaacaagttaaggttgtggaccctgcttttgtaaccgctcccactaaacttattacatatgataatcctgcatatgaaggtatagatgtggataatacattttattttcctagtaatgataatagtattaatatagctccagatcctgactttttggatatagttgctttacataggccagcattaacctctaggcgtactggcattagatacagtagaattggtaataaacaaacactacgtactcgtagtggaaaatctataggtgctaaggtacattattattatgatttaagtactattaatcctgcagaagaaatagaattacaaactataacaccttctacatatactaccacttcacatgcagcctcacccacttctattaataatggattatatgatatttatgcagatgactttattacagatactgttacaaccccagtaccagctataccctctacatccttatcagggtatattcctgcaaatacaacaattccttttggtggtgcatacaatattcctttagtatcaggtcctgatatacccattaatacaactgaccaaactccttcattactccctatagttccagggtctccacaatatacaattattgctgatggaggtgacttttatttacatcctagttattacatgttacgaaaacgacgtaaacgtttaccatattttttttcagatgtctctttggctgcctagtgaggccactgtctacttgcctcctgtcccagtatctaaagttgtaagcacggatgaatatgttgcacgcacaaacatatattatcatgcaggaacatccagactacttgcagttggacatccctattttcctattaaaaaacctaacaataacaaaatattagttcctaaagtatcaggattacaatacagggtatttagaatatatttacctgaccccaataagtttggttttcctgacacctcattttacaatccagatacacagcggctggtttgggcctgtgtaggtgttgaggtaggtcgtggtcagccattaggtgtgggcattagtggccatcctttattaaataaattggatgacaccgaaaatgctagtgcttatgcagcaaatgcaggtgtggataatagagaatgtatatctatggattacaaacaaacacaattgtgtttaattggttgcaaaccacctataggggaacactggggcaaaggatccccatgtaacaatgttgcagtaaatccaggtgattgtccaccattagagttaataaacacagttattcaggatggtgatatggttgataccggctttggtgctatggactttactacattacaggctaacaaaagtgaagttccactggatatttgtacgtctatttgcaaatatccagattatattaaaatggtgtcagaaccatatggcgacagcttatttttttatttacgaagggaacaaatgtttgttagacatttatttaatagggctggtgctgttggtgaaaatgtaccagacgatttatacattaaaggctctgggtctactgcaaatttagccagttcaaattattttcctacacctagtggttctatggttacctctgatgcccaaatattcaataaaccttattggttacaacgagcacagggccacaataatggcatttgttggggtaaccaactatttgttactgttgttgatactacacgcagtacaaatatgtcattatgtgctgccatatctacttcagaacctacatataaaaatactaactttaaagagtacctacgacatggggaggaatatgatttacagtttatttttcaactgtgcaaaataaccttaactgcagacgttatgacatacatacattctatgaattccactattttggaggactggaattttggtttacaaccccctccaggaggcacactagaagatacttataggtttgtaacatcccaggcaattgcttgtcaaaaacatacacctccagcacctaaagaagatccccttaaaaaatatactttttgggaagtaaatttaaaagaaaagttttctgcagacctagatcagtttcctttaggacgcaaatttttactacaagcaggatttaaggccaaaccaaaatttacattaggaaaacgaaaagctacacccaccacctcatctacctctacaactgctaaacgcaaaaaacgtaagctgtaagtattgtatgtatgttgaattagtgttgtttgttgtttatatgtttgtatgtgcttgtatgtgcttgtaaatattacgttgtatgtgtgtttgtatgtatggtataataaacacgtgtgtatgtgtttttaaatgcttgtgtaactattgtgtcatgcaacataaataaacttattgtttcatcacctactaattgtgttgtggttattcattgtatataaactatatttgctacattctgtttttgttttatatatactatattttgtagcgccagcggccattttgtagcttcaaccgaattcggttgcatgctttttggcacaaactgtatttttttaaatagttctatgtcagcaactatagtttaaacttgtacgtttcctgcttgccatgcgtgccaaatccctgttttcctgacctgcactgcttgccaaccattccattgttttttacactgcactatgtgcaactactgaatcactatgtacattgtgtcatataaaataaattactatgcgccaacgccttaaataccgctgttaggcacatatttttggcttgttttaacttacctaattgcatatttggcataaggtttaaacttttaaggccaactaaatgtcaccttagttcatacatgaactgtgtaaaggttagtcatacattgttcatttgtaaaactgcacatgggtgtgtgcaaaccgttttgggttacacatttacaaggaacttatctaataatactaaactacaataattcatgtataaaactaagggcgtaaccgaaatcggttgaaccgaaaccggttagtataaaagcagacattttatgcaccaaaatagaactgcaatgtttcaggacccacaggagcgacccagaaagttaccacatttatgcacagagctgcaaacaactatacatgatataagattagaatgtgtgtactgcaagcaacagttactgcgacgtgaggtatatgactttgcttttcgggatttatgcatagtatatagagatgggaatccatatgcagtgtgtgataaatgtttaaagttttattctaaaattagtgagtatagatattattgttatagtgtgtatggaacaacattagaacagcaatacaacaaaccgttgtgtgatttgttaattaggtgtattaactgtcaaaagccactgtgtcctgaagaaaagcaaagacatctggacaaaaagcaaagattccataatataaggggtcggtggaccggtcgatgtatgtcttgttgcagatcatcgagaacacgtagagaaacccagctgtaatcatgcatggagatacacctacattgcatgaatatatgttagatttgcaaccagagacaactgatctctactgttatgagcaattaaatgacagctcagaggaggaggatgaaatagatggtccagctggacaagcagaaccggacagagcccattacaatattgtaaccttctgttgcaagtgtgactctacgcttcggttgtgcgtacaaagcacacacgtagacatccgtacgttggaagacctgttaatgggcacactaggaattgtgtgccccatctgttctcagaaaccataatctacc

SEQ ID NO: 23 - DNA, 7906 bp, Homo sapiens
  source 1..7906: mol_type = genomic DNA; note = UNCseq1770
atggctgatcctgcaggtaccaatggggaagagggtacgggatgtaatggatggttctatgtagaggctgtagtggaaaaaaaaacaggggatgctatatcagatgacgagaacgaaaatgacagtgatacaggtgaagatttggtagattttatagtaaatgataatgattatttaacacaggcagaaacagagacagcacatgcgttgtttactgcacaggaagcaaaagaacatagagatgcagtacaggttctaaaacgaaagtatttgggtagtccacttagtgatattagtggatgtgtagacaataatattagtcctagattaaaagccatatgtatagaaaaacaaagtagagctgcaaaaaggagattatttgaaagcgaagacagcgggtatggcaatactgaagtggaaactcagcagatgttacaggtagaagggcgccatgagactgaaacaccatgtagtcagtatagtggtggaagtgggggtggtagcagtcagtatagtagtggaagtgggggagagggtgttagtgaaagacatactatatgcgaaacaccacttacaaatattttaaatgtactaaaaactagtaatgcaaaggcagcaatgttagcaaaatttaaagagttatacggggtgagtttttcagaattagtaagaccatttaaaagtaataaatcaacgtgttgcgattggtgtattgctgcatttggacttacacccagtatagctgacagtataaaaacactattacaacaatattgtttatatttacacattcaaagtttagcatgttcatggggaatggttgtgttactattagtaagatataaatgtggaaaaaatagagaaacaattgaaaaattgctgtctaaactattatgtgtgtctccaatgtgtatgatgatagagcctccaaaattgcgtagtacagcagcagcattatattggtataaaacaggtatatcaaatattagtgaagtgtatggagacacgccagaatggatacaaagacaaacagtattacaacatagttttaatgattgtacatttgaattatcacagatggtacaatgggcctacgataatgacatagtagacgatagtgaaattgcatataaatatgcacaattggcagacactaatagtaatgcaagtgcctttctaaaaagtaattcacaggcaaaaattgtaaaggattgtgcaacaatgtgtagacattataaacgagcagaaaaaaaacaaatgagtatgagtcaatggataaaatatagatgtgatagggtagatgatggaggtgattggaagcaaattgttatgtttttaaggtatcaaggtgtagagtttatgtcatttttaagtgcattaaaaagatttctgcaaggcatacctaaaaaaaattgcatattactatatggtgcagctaacacaggtaaatcattatttggtatgagtttaatgaaatttctgcaagggtccgtaatatgttttgtaaattctaaaagccatttttggttacaaccattagcagatgccaaaataggtatgttagatgatgctacagtgccctgttggaactacatagatgacaatttaagaaatgcattggatggaaatttagtttctatggatgtaaagcatagaccattggtacaactaaaatgccctccattattaattacatctaacattaatgctggtacagattccaggtggccttatttacataatcgattggtggtgtttacatttcctaatgagtttccatttgacgaaaacggaaatccagtgtatgagcttaatgataagaactggaaatcctttttctcaaggacgtggtccagattaagtttgcacgaggacgaggacaaggaaaacgatggagactctttgccaacgtttaaatgtgtgtcaggacaaaatactaacacattatgaaaatgatagtacagacctacgtgaccatatagactattggaaacacatgcgcctagaatgtgctatttattacaaggccagagaaatgggatttaaacatattaaccaccaggtggtgccaacactggctgtatcaaagaataaagcattacaagcaattgaactgcaactaacgttagaaacaatatataactcacaatatagtaatgaaaagtggacattacaagacgttagccttgaagtgtatttaactgcaccaacaggatgtataaaaaaacatggatatacagtggaagtgcagtttgatggagacatatgcaatacaatgcattatacaaactggacacatatatatatttgtgaagaaacatcagtaactgtggtagagggtcaagttgactattatggtttatattatgttcatgaaggaatacaaacatattttgtgcagtttaaagatgatgcagaaaaatatagtaaaaataaagtatgggaagttcatgcgggtggtcaggtaatattatgtcctacatctgtgtttagcagcaacgaagtatcctctgctgaaattattaggcagcacttggccaaccactccgccgcgacccataccaaagccgtcgccttgggcaccgaagaaacacagacgactatccagcgaccaagatcagagccagacaccggaaacccctgccacaccaataagttgttgcacagagactccgtggacagtgctccaatcctcactgcagttaacagctcacacaaaggacggattaactgtaatagtaacactacacccatagtacatttaaaaggtgatgctaatactttaaaatgtttaagatatagatttaaaaagcattgtacattgtatactgcagtgtcgtctacatggcattggacaggacataatgtaaaacataaaagtgcaattgttacacttacatatgatagtgaatggcaacgtgaccaatttttgtctcaagtgaaaataccaaaaactattacagtgtctactggatttatgtctatatgacaaaccttgatactgcatccacaacattactggcgtgctttttgctttgcttttgtgtgcttttgtgtgtctgcctattaatacgtccgctgcttttgtctgtgtctacatacacatcattaatactattggtattagtattgtggataacagcagcctctgcgtttaggtgttttattgtatatattgtatttgtttatatacccttatttttaatacatacacatgcacgcttcttaattacataatgtatatgtacataatgtaattgttacatataattgttgtataccatcacttactgatttttcttttgtatttttatatataatttttttttttgtttgtttgtttgttttttaataaactgttattacttaacaatgcgacacaaacgttctgcaaaacgcacaaaacgtgcatcggccacccaactttataaaacatgcaaacaggcaggtacatgtccacctgacattatacctaaggttgaaggcaaaactattgctgatcaaatattacaatatggaagtatgggtgtattttttggtgggttaggaattggaacagggtcgggtacaggcggacgcactgggtatattccattgggaacaaggcctcccacagctacagatacacttgctcctgtaagaccccctttaacggtagatcctgtgggcccttctgatccgtctatagtttcgttagtggaagaaactagttttattgatgctggtgcaccaacacctgtaccttccattcccccagatgtatcaggatttagtattactacttcaactgataccacacctgctatattagatattaataatactgttactactgttactacacataataatcccactttcactgacccatctgtattgcagcctccaacacctgcagaaactggagggcattttacactttcatcatccactattagtacacataattatgaagaaattcctatggatacatttattgttagcacaaaccctaacacagtaactagtagcacacccataccggggtctcgcccagtggcacgcctaggattatatagtcgcacaacacaacaagttaaagttgtagaccctgcttttgtaaccactcccactaaacttattacatatgataatcctgcatatgaaggtatagatgtggataatacattatattttcctagtaatgataatagtattaatatagctccagatcctgactttttggatatagttgctttacataggccagcattaacctctaggcgtactggcattaggtacagtagaattggtaataaacaaacactacgtactcgtagtggaaaatctataggtgctaaggtacattattattatgatttaagtactattaatcctgcagaagaaatagaattacaaactataacaccttctacatatactaccccttcacatgcagcctcacccacttctattaataatggattatatgatatttatgcagatgactttattacagatacttctacaaccccggtaccatctgtaccctctacatccttatcaggttatattcctgcaaatacaacaattccttttggtggtgcatacaatattcctttagtatcaggtcctgatatacccattaataccactgaccaaactccttcattaattcctatagttccagggtctccacaatatacaattattgctgatggaggtgacttttatttacatcctagttattacatgttacgaaaacgacgtaaacgtttaccatattttttttcagatgtctctttggctgcctagtgaggccactgtctacttgcctcctgtcccagtatctaaggttgtaagcacggatgaatatgttgcacgcacaaacatatattatcatgcaggaacatccagactacttgcagttggacatccctattttcctattaaaaaacctaacaataacaaaatattagttcctaaagtatcaggattacaatacagggtatttagaatacatttacctgaccccaataagtttggttttcctgacacctcattttacaatccagatacacagcggctggtttgggcctgtgtaggtgttgaggtaggtcgtggtcagccattaggtgtgggcattagtggccatcctttattaaataaattggatgacacagaaaatgctagtgcttatgcagcaaatgcaggtgtggataatagagaatgtatatctatggattacaaacaaacacaattgtgtttaattggttgcaaaccacctataggggaacactggggcaaaggatccccatgtaccaatgttgcagtaactccaggtgattgtccaccattagagttaataaacacagttattcaggatggtgatatggttgataccggctttggtgctatggactttactacattacaggctaacaaaagtgaagttccactggatatttgtacgtctatttgcaaatatccagattatattaaaatggtgtcagaaccatatggcgacagcttatttttttatttacgaagggaacaaatgtttgttagacatttatttaatagggctggtactgttggtgaaaatgtaccagacgatttatacattaaaggctctgggtctactgcaaatttagccagttcaaattattttcctacacctagtggttctatggttacctctgatgcccaaatattcaataaaccttattggttacaacgagcacagggccacaataatggcatttgttggggtaaccaactatttgttactgttgttgatactacacgcagtacaaatatgtcattatgtgctgccatatctacttcagaacctacatataaaaatactaactttaaagagtacctacgacatggggaggaatatgatttacagtttatttttcaactgtgcaaaataaccttaactgcagacgttatgacatacatacattctatgaattccactattttggaggactggaattttggtctacaacctcccccaggaggcacactagaagatacttataggtttgtaacatcccaggcaattgcttgtcaaaaacatacacctccagcacctaaagaagatccccttaaaaaatatactttttgggaagtaaatttaaaagaaaagttttctgcagacctagatcagtttcctttaggacgcaaatttttactacaagcaggattgaaggccaaaccaaaatttacattaggaaaacgaaaagctacacccaccacctcatctacctctacaactgctaaacgcaaaaaacgtaagctgtaagtattgtatgtatgttgaattagtgttgtttgttgtgtatatgtttgtatgtgcttgtatgtgcttgtaaatattacgttgtatgtgtgtttgtatgtatggtataataaacacgtgtgtatgtgtttttaaatgcttgtgtaactattgtgtcatgcaacataaataaacttattgtttcaacacctactaattgtgttgtggttattcattgtatataaactatatttgctacatcctgtttttgttttatatatactatattttgtagcgccagcggccattttgtagcttcaaccgaattcggttgcatgctttttggcacaaaatgtgtttttttaaatagttctatgtcagcaactatggtttaaacttgtacgtttcctgcttgccatgcgtgccaaatccctgttttcctgacctgcactgcttgccaaccattccattgttttttacactgcactatgtgcaactactgaatcactatgtacattgtgtcatataaaataaattactatgcgccaacgccttacataccgctgttaggcacatatttttggcttgttttaactaacctaattgcatatttggcataaggtttaaacttctaaggccaactaaatgtcaccctagttcatacatgaactgtgtaaaggttagtcatacattattcatttttacagctgcacatgggtgtgtgcaaaccgttttgggttacacatttacaagcaacttatataataatactaaactacaataattcatgtataaaactaagggcgtaaccgaaatcggttgaaccgaaaccggttagtataaaagcagacattttatgcaccaaaagagaactgcaatgttccaggacccacaggagcgacccataaagttaccacagttatgcacagagctgcaaacaactatacatgatataatattagaatgtgtgtactgcaagcaacagttactgcgacgtgaggtatatgactttgcttttcgggatttatgcatagtatatagagatgggaatccatatgcagtgtgtgataaatgtttaaagttttattctaaaattagtgagtatagatattattgttatagtttgtatggaacaacattagaacagcaatacaacaaaccgttgtgtgatttgttaattaggtgtattaactgtcaaaagccactgtgtcctgaagaaaagcaaagacatctggacaaaaagcaaagattccataatataaggggtcggtggaccggtcgatgtatgtcttgttgcagatcatcaagaacacgtagagaaacccagctgtaatcatgcatggagatacacctacattgcatgaatatatgttagatttgcaaccagagacaactgatctctactgttatgagcaattaagtgacagctcagaggaggaggatgaaatagatggtccagctggacaagcagaaccggacagagcccattacaatattgtaaccttttgttgcaagtgtgactctacgcttcggttgtgcgtacaaagcacacacgtagacattcgtacgttggaagacctgttaatgggcacactaggaattgtgtgccccatctgttctcagaaaccataatctacc

SEQ ID NO: 24 - DNA, 7906 bp, Homo sapiens
  source 1..7906: mol_type = genomic DNA; note = UNCseq1787
atggctgatcctgcaggtaccaatggggaagagggtacgggatgtaatggatggttttatgtagaggctgtagtggaaaaaaaaacaggggatgctatatcagatgacgagaacgaaaatgacagtgatacaggtgaagatttggtagattttatagtaaatgataatgattatttaacacaggcagaaacagagacagcacatgcgttgtttactgcacaggaagcaaaacaacatagagatgcagtacaggttctaaaacgaaagtatttgggtagtccacttagtgatattagtggatgtgtagacaataatattagtcctagattaaaagctatatgtatagaaaaacaaagtagagctgcaaaaaggagattatttgaaagcgaagacagcgggtatggcaatactgaagtggaaactcagcagatgttacaggtagaagggcgccatgagactgaaacaccatgtagtcagtatagtggtggaagtgggggtggttgcagtcagtacagtagtggaagtgggggagagggtgttagtgaaagacacactatatgccaaacaccacttacaaatattttaaatgtactaaaaactagtaatgcaaaggcagcaatgttagcaaaatttaaagagttatacggggtgagtttttcagaattagtaagaccatttaaaagtaataaatcaacgtgttgcgattggtgtattgctgcatttggacttacacccagtatagctgacagtataaaaacactattacaacaatattgtttatatttacacattcaaagtttagcatgttcatggggaatggttgtgttactattagtaagatataaatgtggaaaaaatagagaaacaattgaaaaattgctgtctaaactattatgtgtgtctccaatgtgtatgatgatagagcctccaaaattgcgtagtacagcagcagcattatattggtataaaacaggtatatcaaatattagtgaagtgtatggagacacgccagaatggatacaaagacaaacagtattacaacatagttttaatgattgtacatttgaattatcacagatggtacaatgggcctacgataatgacatagtagacgatagtgaaattgcatataaatatgcacaattggcagacactaatagtaatgcaagtgcctttctaaaaagtaattcacaggcaaaaattgtaaaggattgtgcaacaatgtgtagacattataaacgagcagaaaaaaaacaaatgagtatgagtcaatggataaaatatagatgtgatagggtagatgatggaggtgattggaagcaaattgttatgtttttaaggtatcaaggtgtagagtttatgtcatttttaactgcattaaaaagatttttgcaaggcatacctaaaaaaaattgcatattactatatggtgcagctaacacaggtaaatcattatttggtatgagtttaatgaaatttctgcaagggtctgtaatatgttttgtaaattctaaaagccatttttggttacaaccattagcagatgccaaaataggtatgttagatgatgctacagtgccctgttggaactacatagatgacaatttaagaaatgcattggatggaaatttagtttctatggatgtaaagcatagaccattggtacaactaaaatgccctccattattaattacatctaacattaatgctggtacagattctaggtggccttatttacataatagattggtggtgtttacatttcctaatgagtttccatttgacgaaaacggaaatccagtgtatgagcttaatgataagaactggaaatcctttttctcaaggacgtggtccagattaagtttgcacgaggacgaggacaaggaaaacgatggagactctttgccaacgtttaaatgtgtgtcaggacaaaatactaacacattatgaaaatgatagtacagacctacgtgaccatatagactattggaaacacatgcgcctagaatgtgctatttattacaaggccagagaaatgggatttaaacatattaaccaccaggtggtgccaacactggctgtatcaaagaataaagcattacaagcaattgaactgcaactaacgttagaaacaatatataactcacaatatagtaatgaaaagtggacattacaagacgttagccttgaagtgtatttaactgcaccaacaggatgtataaaaaaacatggatatacagtggaagtgcagtttgatggagacatatgcaatacaatgcattatacaaactggacacatatatatatttgtgaagaagcatcagtaactgtggtagagggtcaagttgactattatggtttatattatgttcatgaaggaatacgaacatattttgtgcagtttaaagatgatgcagaaaaatatagtaaaaataaagtatgggaagttcatgcgggtggtcaggtaatattatgtcctacatctgtgtttagcagcaacgaagtatcctctcctgaaattattaggcagcacttggccaaccactccgccgcgacccataccaaagccgtcgccttgggcaccgaagaaacacagacgactatccagcgaccaagatcagagccagacaccggaaacccctgccacaccactaagttgttgcacagagactcagtggacagtgctccaatcctcactgcatttaacagctcacacaaaggacggattaactgtaatagtaacactacacccatagtacatttaaaaggtgatgctaatactttaaaatgtttaagatatagatttaaaaagcattgtacattgtatactgcagtgtcgtctacatggcattggacaggacataatgtaaaacataaaagtgcaattgttacacttacatatgatagtgaatggcaacgtgaccaatttttgtctcaagttaaaataccaaaaactattacagtgtctactggatttatgtctatatgacaaatcttgatactgcatccacaacattactggcgtgctttttgctttgcttttgtgtgcttttgtgtgtctgcctattaatacgtccgctgcttttgtctgtgtctacatacacatcattaatactattggtattactattgtggataacagcagcctctgcgtttaggtgttttattgtatatattgtatttgtttatataccattatttttaatacatacacatgcacgctttttaattacataatgtatatgtacaaaatgtaattgttacatataattgttgtataccataacttactattttttcttttttattttcatatatattttttttttttgtttgtttgtttgttttttaataaactgttatcacttaacaatgcgacacaaacgttctgcaaaacgcacaaaacgtgcatcggctacccaactttataaaacatgcaaacaggcaggtacatgtccacctgacattatacctaaggttgaaggcaaaactattgctgatcaaatattacaatatggaagtatgggtgtattttttggtgggttaggaattggaacagggtcgggtacaggcggacgcactgggtatattccattgggaacaaggcctcccacagctacagatacacttgctcctgtaagaccccctttaacagtagatcctgtgggcccttctgatccttctatagtttctttagtggaagaaactagttttattgatgctggtgcaccaacatctgtaccttccattcccccagatgtatcaggatttagtattactacttcaactgataccacacctgctatattagatattaataatactgttactactgttactacacataataatcccactttcactgacccatctgtattgcagcctccaacacctgcagaaactggagggcattttacactttcatcatccactattagtacacataattatgaagaaattcctatggatacatttattgttagcacaaaccctaacacagtaactagtagcacacccataccagggtctcgcccagtggcacgcctaggattatatagtcgcacaacacaacaagttaaagttgtagaccctgcttttataaccactcccactaaacttattacatatgataatcctgcatatgaaggtatagatgtggataatacattatatttttctagtaatgataatagtattaatatagctccagatcctgactttttggatatagttgctttacataggccagcattaacctctaggcgtactggcattaggtatagtagaattggtaataaacaaacactacgtactcgtagtggaaaatctataggtgctaaggtacattattattatgatttaagtactattgatcctgcagaagaaatagaattacaaactataacaccttctacatatactaccacttcacatgcagcctcacctacttctattaataatggattatatgatatttatgcagatgactttattacagatacttctacaaccccggtaccatctgtaccctctacatctttatcaggttatattcctgcaaatacaacaattccttttggtggtgcatacaatattcctttagtatcaggtcctgatatacccattaatataactgaccaagctccttcattaattcctatagttccagggtctccacaatatacaattattgctgatgcaggtgacttttatttacatcctagttattacatgttacgaaaacgacgtaaacgtttaccatattttttttcagatgtctctttggctgcctagtgaggccactgtctacttgcctcctgtcccagtatctaaggttgtaagcacggatgaatatgttgcacgcacaaacatatattatcatgcaggaacatccagactacttgcagttggacatccctattttcctattaaaaaacctaacaataacaaaatattagttcctaaagtatcaggattacaatacagggtatttagaatacatttacctgaccccaataagtttggttttcctgacacctcattttataatccagatacacagcggctggtttgggcctgtgtaggtgttgaggtaggtcgtggtcagccattaggtgtgggcattagtggccatcctttattaaataaattggatgacacagaaaatgctagtgcttatgcagcaaatgcaggtgtggataatagagaatgtatatctatggattacaaacaaacacaattgtgtttaattggttgcaaaccacctataggggaacactggggcaaaggatccccatgtaccaatgttgcagtaaatccaggtgattgtccaccattagagttaataaacacagttattcaggatggtgatatggttgatactggctttggtgctatggactttactacattacaggctaacaaaagtgaagttccactggatatttgtacatctatttgcaaatatccagattatattaaaatggtgtcagaaccatatggcgacagcttatttttttatttacgaagggaacaaatgtttgttagacatttatttaatagggctggtactgttggtgaaaatgtaccagacgatttatacattaaaggctctgggtctactgcaaatttagccagttcaaattattttcctacacctagtggttctatggttacctctgatgcccaaatattcaataaaccttattggttacaacgagcacagggccacaataatggcatttgttggggtaaccaactatttgttactgttgttgatactacacgcagtacaaatatgtcattatgtgctgccatatctacttcagaaactacatataaaaatactaactttaaggagtacctacgacatggggaggaatatgatttacagtttatttttcaactgtgcaaaataaccttaactgcagacgttatgacatacatacattctatgaattccactattttggaggactggaattttggtctacaacctcccccaggaggcacactagaagatacttataggtttgtaacatcccaggcaattgcttgtcaaaaacatacacctccagcacctaaagaagatccccttaaaaaatacactttttgggaagtaaatttaaaggaaaagttttctgcagacctagatcagtttcctttaggacgcaaatttttactacaagcaggattaaaggccaaaccaaaatttacattaggaaaacgaaaagctacacccaccacctcatctacctctacaactgctaaacgcaaaaaacgtaagctgtaagtattgtatgtatgttgaattagtgttgtttgttgtttatatgtttgtatgtgcttgtatgtgcttgtaaatattaagttgtatgtgtgtttgtatgtatggtataataaacacgtgtgtatgtgtttttaaatgcttgtgtaactattgtgtcatgcaacataaataaacttattgtttcaacacctactaattgtgttgtggttattcattgtatataaactatatttgctacatcctgtttttgttttatatatactatattttgtagcgccagcggccattttgtagcttcaaccgaattcggttgcatgctttttggcacaaaatgtgtttttttaaatagttctatgtcagcaactatggtttaaacttgtacgtttcctgcttgccatgcgtgccaaatccctgttttcctgacctgcactgcttgccaaccattccattgttttttacactgcactatgtgcaactactgaatcactatgtacattgtgtcatataaaataaatcactatgcgccaacgccttacataccgctgttaggcacatatttttggcttgttttaactaacctaattgcatatttggcataaggtttaaacttctaaggccaactaaatgtcaccctagttcatacatgaactgtgtaaaggttagtcatacattgttcatttgtaaaactgcacatgggtgtgtgcaaaccgttttgggttacacatttacaagcaacttatataataatactaaactacaataattcatgtataaaactaagggcgtaaccgaaatcggttgaaccgaaaccggttagtataaaagcagacattttatgcaccaaaagagaactgcaatgtttcaggacccacaggagcgacccagaaagttaccacagttatgcacagagctgcaaacaactatacatgatataatattagaatgtgtgtactgcaagcaacagttactgcgacgtgaggtatatgactttgcttttcgggatttatgcatagtatatagagatgggaatccatatgctgtatgtgataaatgtttaaagttttattctaaaattagtgagtatagacattattgttatagtgtgtatggaacaacattagaacagcaatacaacaaaccgttgtgtgatttgttaattaggtgtattaactgtcaaaagccactgtgtcctgaagaaaagcaaagacatctggacaaaaagcaaagattccataatataaggggtcggtggaccggtcgatgtatgtcttgttgcagatcatcaagaacacgtagagaaacccagctgtaatcatgcatggagatacacctacattgcatgaatatatgttagatttgcaaccagagacaactgatctctactgttatgagcaattaaatgacagctcagaggaggaggatgaaatagatggtccagctggacaagcagaaccggacagagcccattacaatattgtaaccttttgttgcaagtgtgactctacgcttcggttgtgcgtacaaagcacacacgtagacattcgtactttggaagacctgttaatgggcacactaggaattgtgtgccccatctgttctcagaaaccataatctacc

SEQ ID NO: 25 - DNA, 7906 bp, Homo sapiens
  source 1..7906: mol_type = genomic DNA; note = UNCseq1796
atggctgatcctgcaggtaccaatggggaagagggtacgggatgtaatggatggttttatgtagaggctgtagtggaaaaaaaaacaggggatgctatatcagatgacgagaacgaaaatgacagtgatacaggtgaagatttggtagattttatagtaaatgataatgattatttgacacaggcagaaacagagacagcacatgcgttgtttactgcacaggaagcaaaagaacatagagatgcagtacaggttctaaaacgaaagtatttgggtagtccacttagtgatattagtgaatgtgtagacaataatattagtcctagattaaaagccatatgtatagaaaaacaaagtagagctgcaaaaaggagattatttgaaagcgaagacagcgggtatggcaatactgaagtggaaactcagcagatgttacaggtagaagggcgccatgagactgaaacaccatgtagtcagtatagtggtggaagtgggggtggtagcagtcagtatagtagtggaagtgggggagagggtgttagtgaaagacacactatatgcgaaacaccacttacaaatattttaaatgtactaaaaactagtaatgcaaaggcagcaatgctagcaaaatttaaagagttatacggggtgagttttacagaattagtaagaccatttaaaagtaataaatcaacgtgttgcgattggtgtattgctgcatttggacttacacccagtatagctgacagtataaaaacattattacaacaatattgtttatatttacacattcaaagtttagcgtgttcatggggaatggttgtgttactattagtaagatataaatgtggaaaaaatagagaaacaattgaaaaattgatgtctaaactattatgtgtgtctccaatgtgtatgatgatagagcctccaaaattgcgtagtacagcagcagcattatattggtataaaacaggtatgtcaaatattagtgaagtgtatggagacacgccagaatggatacaaagacaaacagtattacaacatagttttaatgattgtacatttgaattatcacagatggtacaatgggcctacgataatgacatagtagacgatagtgaaattgcatataaatatgcacaattggcagacactaatagtaatgcaagtgcctttttaaaaagtaattcacaggcaaaaattgtaaaggattgtgcaacaatgtgtagacattataaacgagcagaaaaaaaacaaatgagtatgagtcaatggataaaatatagatgtgatagggtagatgatggaggtgattggaagcaaattgttatgtttttaaggtatcaaggtgtagactttatgtcatttttaagtgcattaaaaaaatttctgcaaggtatacctaaaaaaaattgcatattattatatggtgcagctaacacaggtaaatcattatttggtatgagtttaatgaaattcttgcaagggtctgtaatatgttttgtaaattctaaaagccatttttggttacaaccattagcagatgccaaaataggtatgttagatgatgctacagtgccctgttggaactacatagatgacaatttaagaaatgcattggatggaaatttagtttctatggatgtaaagcatagaccattggtacaactaaaatgccctccattattaattacatctaacattaatgctggtacagattccaggtggccttatttacataatcgattggtggtgtttacatttccaaatgagtttccatttgacaaaaacggaaatccagtgtatgagcttaatgataagaactggaaatcctttttctcaaggacgtggtccagattaagtttgcacgaggacgaggacaaggaaaacgatggagactctttgccaacgtttaaatgtgtgtcaggacaaaatactaacacattatgaaaatgatagtacagacctacgtgaccatatagactattggaaacaaatgcgcctagaatgtgctatttattacaaggccagagaaatgggatttaaacatattaaccaccaggtggtgccaacactggctgtatcaaagaataaagcattacaagcaattgaactgcaactaacgttagaaacaatatataactcacaatatagtaatgaaaagtggacattacaagacgttagccttgaagtgtatttaactgcaccaacaggatgtataaaaaaacatggatatacagtggaagtgcagtttgatggagacatatgcaatacaatgcattatacaaactggaaacatatatatatttgtgaagacacatcagtaactgtggtagagggtcaagttgactattatggtatatattatgttcatgaaggaatacaaacatattttgtgcagtttaaagatgatgcagaaaaatatagtaaaaataaagtatgggaagttcatgcgggtggtcaggtaatattatgtcctacatctgtgtttagcagcgacgaagtatcctctgctgaaattactaggcagcacttggccaaccactccgccgcgacccataccaaagccgtcgccttgggcaccaaagaaacacagacgactatccagcgaccaagatcagagccagacaccggaaacccctgccacaccaacaagttgttgcacagagactccgtggacagtgctccaatcctcactgcatttaacagctcacacaaaggacggattaactgtaatagtaacactacacccatagtacatttaaaaggtgatgctaatactttaaaatgtttaagatacagatttaaaaagcattgtaaattgtatacagcagtgtcgtccacatggcattggacaggacataatgtaaaacataaaagtgcaattgttacacttacatatgatagtgaatgtcaacgtgaacaatttttgtctcaagtgaaaataccaaaaactattacagtgtctactggatttatgtctatatgacaaaccttgatactgcatccacaacattactggcgtgctttttgctttgcttttgtgtgcttttgtgtgtctgcctattaatacgtccgctgcttttgtctgtgtctacatacacatcattaatactattggtattagtattgtggataacagcagcctctgcatttaggtgttttattgtatatattgtatttgtttatataccattatttttaatacatacacatgcacgcttcttaattacataatgtatatgtacataatgtaattgttacatataattgttgtataccataaattactattttttcttttttattttcatatatagtttttttttttgtttatttgtgtgttttttaataaactgttattacttaacaatgcgacacaaacgttctgcaaaacgcacaaaacgtgcatcggccacccaactttataaaacatgcaaacaggcaggtacatgtccacctgacattatacctaaggttgaaggcaaaactattgctgatcaaatattacaatatggaagtatgggtgtattttttggtgggttaggaattggaacagggtcgggtacaggcggacgcactgggtacattccattaggaacaaggcctcccacagctacagatacacttgctcctgtaagaccccctttaacagtagatcctgtgggcccttctgatccttctatagtttctttagtggaagaaactagttttattgatgctggtgcaccaacccctgtaccttccattcccccagatgtatcaggatttagtattacaacttcaactgataccacacctgctatattagatattaataatactgttactactgttactacacataataatcccacttttactgacccatctgtattgcagcctccaacacctgcagaaactggagggcattttacactttcatcatccactattagtacacataattatgaagaaattcctatggatacatttattgttagcacaaaccctaacacagtaactagtagcacacccataccggggtctcgcccagtggcacgcctaggattatatagtcgcacaacacaacaagttaaggttgtggaccctgcttttgtaaccgctcccactaaacttattacatatgataatcctgcatatgaaggtatagatgtggataatacattttattttcctagtaatgataatagtattaatatagctccagatcctgactttttggatatagttgctttacataggccagcattaacctctaggcgtactggcattagatacagtagaattggtaataaacaaacactacgtactcgtagtggaaaatctataggtgctaaggtacattattattatgatttaagtactattaatcctgcagaagaaatagaattacaaactataacaccttctacatatacaaccacttcccatgcagcctcaccaacttctattaataatggattatatgatatttatgcagatgactttattacagatactgttacaaccccagtaccagctataccctctacatccttatcaggttatattcctgcaaatacaacaattccttttggtggtgcatacaatattcctttagtatcaggacctgatatacctattaatacaactgaccaaactccttcattaattcctatagttccagggtctccacaatatacaattattgctgatggaggtgacttttatttacatcctagttattacatgttacgaaaacgacgtaaacgtttaccatattttttttcagatgtctctttggctgcctagtgaggccactgtctacttgcctcctgtcccagtatctaaagttgtaagcacggatgaatatgttgcacgcacaaacatatattatcatgcaggaacatccagactacttgcagttggacatccctattttcctattaaaaaacctaacaataacaaaatattagttcctaaagtatcaggattacaatacagggtatttagaatacatttacctgaccccaataagtttggttttcctgacacctcattttacaatccagatacacagcggctggtttgggcctgtgtaggtgttgaggtaggtcgtggtcagccattaggtgtgggcattagtggccatcctttattaaataaattggatgacacagaaaatgctagtgcttatgcagcaaatgcaggtgtggataatagagaatgtatatctatggattacaaacaaacacaattgtgtttaattggttgcaaaccacctataggggaacactggggcaaaggatccccatgtaccaatgttgcagtaactccaggtgattgtccaccattagagttaataaacacagttattcaggatggtgatatggttgataccggctttggtgctatggactttactacattacaggctaacaaaagtgaagttccactggatatttgtacatctatttgcaaatatccagattatattaaaatggtgtcagaaccatatggcgacagcttatttttttatttacgaagggaacaaatgtttgttagacatttatttaatagggctggtgctgttggtgaaaatgtaccagacgatttatacattaaaggctctgggtctactgcaaatttagccagttcaaattattttcctacacctagtggttctatggttacctctgatgcccaaatatttaataaaccttattggttacaacgagcacagggccacaataatggcatttgttggggtaaccaactatttgttactgttgttgatactacacgcagtacaaatatgtcattatgtgctgccatatctacttcagaacctacatataaaaatactaactttaaagagtacctacgacatggggaggaatatgatttacagtttatttttcaactgtgcaaaataaccttaactgcagacgttatgtcatacatacattctatgaattccactattttggaggactggaattttggtttacaacctcctccaggaggcacactagaagatacttataggtttgtaacatcccaggcaattgcttgtcaaaaacatacacctccagcacctaaagaagatccccttaaaaaatatactttttgggaagtaaatttaaaagaaaagttttctgcagacctagatcagtttcctttaggacgcaaatttttactacaagcaggatttaaggccaaaccaaaatttacattaggaaaacgaaaagctacacccaccacctcatctacctctacaactgctaaacgcaaaaaacgtaagctgtaagtattgtatgtatgttgaattagtgttggttgttgtttatatgtttgtatgtgcttgtatgtgcttgtaaatattacgttgtatgtgtgtttgtatgtatggtataataaacacgtgtgtatgtgtttttaaatgcttgtgtaactattgtgtcatgcaacataaataaacttattgtttcatcacctactaattgtgttgtggttattcattgtatataaactatatttgctacattttgtttttgttttatatatactatattttgtagcgccagcggccattttgtagcttcaaccgaattcggttgcatgctttttggcacaaaatgtgtttttttaaatagttctatgtcagcaactatagtttaaacttgtacgtttcctgcttgccatgcgtgccaaatccctgttttcctgacctgcactgcttgccaaccattccattgttttttacactgcactatgtgcaactactgaatcactatgtacattgtgtcatataaaataaattactatgcgccaacgccttaaataccgctgttaggcacatatttttggcttgttttaactcacctaattgcatagttggcataaggtttaaacttttaaggccaactaaatgtcaccttagttcatacatgaactgtgtaaaggttagtcatacattgttcatttgtaaaactgcacatgggtgtgtgcaaaccgttttgggttacacatttacaaggaacttatataataatactaaactacaataattcatgtataaaactaagggcgtaaccgaaatcggttgaaccgaaaccggttagtataaaagcagacattttatgcaccaaaagagaactgcaatgtttcaggacccacaggagcgacccagaaagttaccacatttatgcacagagctgcaaacaactatacatgatataatattagaatgtgtgtactgcaagcaacagttactgcgacgtgaggtatatgactttgcttttcgggatttatgcatagtatatagagatgggaatccatatgcagtgtgtgataaatgtttaaagttttattctaaaattagtgagtatagatattattgttatagtgtgtatggaacaacattagaacagcaatacaacaaaccgttgtgtgatttgttaattaggtgtattaactgtcaaaagccactgtgtcctgaagaaaagcaaagacatctggacaaaaagcaaagattccataatataaggggtcggtggaccggtcgatgtatgtcttgttgcagatcatcgagaacacgtagagaaacccagctgtaatcatgcatggagatacacctacattgcatgaatatatgttagatttgcaaccagagacaactgatctctactgttatgagcaattaaatgacagctcagaggaggaggatgaaatagatggtccagctggacaagcagaaccggacagagcccattacaatattgtaaccttttgttgcaagtgtgactctacgcttcggttgtgcgtacaaagcacacacgtagacatccgtacgttggaagacctgttaatgggcacactaggaattgtgtgccccatctgttctcagaaaccataatctacc

SEQ ID NO: 26 - DNA, 7906 bp, Homo sapiens
  source 1..7906: mol_type = genomic DNA; note = UNCseq1834
atggctgatcctgcaggtaccaatggggaagagggtacgggatgtaatggatggttttatgtagaggctgtagtggaaaaaaaaacaggggatgctatatcagatgacgagaacgaaaatgacagtgatacaggtgaagatttggtagattttatagtaaatgataatgattatttaacacaggcagaaacagagacagcacatgcgttgtttactgcacaggaagcaaaacaacatagagatgcagtacaggttctaaaacgaaagtatttgggtagtccacttagtgatattagtggatgtgtagacaataatattagtcctagattaaaagctatatgtatagaaaaacaaagtagagctgcaaaaaggagattatttgaaagcgaagacagcgggtatggcaatactgaagtggaaactcagcagatgttacaggtagaagggcgccatgagactgaaacaccatgtagtcagtatagtggtggaagtgggggtggttgcagtcagtacagtagtggaagtgggggagagggtgttagtgaaagacacactatatgccaaacaccacttacaaatattttaaatgtactaaaaactagtaatgcaaaggcagcaatgttagcaaaatttaaagagttatacggggtgagttttacagaattagtaagaccatttaaaagtaataaatcaacgtgttgcgattggtgtattgctgcatttggacttacacccagtatagctgacagtataaaaacactattacaacaatattgtttatatttacacattcaaagtttagcatgttcatggggaatggttgtgttactattagtaagatataaatgtggaaaaaatagagaaacaattgaaaaattgctgtctaaactattatgtgtgtctccaatgtgtatgatgatagagcctccaaaattgcgtagtacagcagcagcattatattggtataaaacaggtatatcaaatattagtgaagtgtatggagacacgccagaatggatacaaagacaaacagtattacaacatagttttaatgattgtacatttgaattatcacagatggtacaatgggcctacgataatgacatagtagacgatagtgaaattgcatataaatatgcacaattggcagacactaatagtaatgcaagtgcctttctaaaaagtaattcacaggcaaaaattgtaaaggattgtgcaacaatgtgtagacattataaacgagcagaaaaaaaacaaatgagtatgagtcaatggataaaatatagatgtgatagggtagatgatggaggtgattggaagcaaattgttatgtttttaaggtatcaaggtgtagagtttatgtcatttttaactgcattaaaaagatttttgcaaggcatacctaaaaaaaattgcatattactatatggtgcagctaacacaggtaaatcattatttggtatgagtttaatgaaatttctgcaagggtctgtaatatgttttgtaaattctaaaagccatttttggttacaaccattagcagatgccaaaataggtatgttagatgatgctacagtgccctgttggaactatatagatgacaatttaagaaatgcattggatggaaatttagtttctatggatgtaaagcatagaccattggtacaactaaaatgccctccattattaattacatctaacattaatgctggtacagattctaggtggccttatttacataatagattggtggtgtttacatttcctaatgagtttccatttgacgaaaacggaaatccagtgtatgagcttaatgataagaactggaaatcctttttctcaaggacgtggtccagattaagtttgcacgaggacgaggacaaggaaaacgatggagactctttgccaacgtttaaatgtgtgtcaggacaaaatactaacacattatgaaaatgatagtacagacctacgtgaccatatagactattggaaacacatgcgcctagaatgtgctatttattacaaggccagagaaatgggatttaaacatattaaccaccaggtggtgccaacgctggctgtatcaaagaataaagcattacaagcaattgaactgcaactaacgttagaaacaatatataactcacaatatagtaatgaaaagtggacattacaagacgttagccttgaagtgtatttaactgcaccaacaggatgtataaaaaaacatggatatacagtggaagtgcagtttgatggagacatatgcaatacaatgcattatacaaactggacacatatatatatttgtgaagaagcatcagtaactgtggtagagggtcaagttgactattatggtttatattatgttcatgaaggaatacgaacatattttgtgcagtttaaagatgatgcagaaaaatatagtaaaaataaagtatgggaagttcatgcgggtggtcaggtaatattatgtcctacatctgtgtttagcagcaacgaagtatcctctcctgaaactattaggcagcacttggccaaccaccccgccgcgacccataccaaagccgtcgccttgggcaccgaagaaacacagacgactatccagcgaccaagatcagagccagacaccggaaacccctgccacaccactaagttgttgcacagagactcagtggacagtgctccaatcctcactgcatttaacagctcacacaaaggacggattaactgtaatagtaacactacacccatagtacatttaaaaggtgatgctaatactttaaaatgtttaagatatagatttaaaaagcattgtaaattgtatactgcagtgtcgtctacatggcattggacaggacataatgtaaaacataaaagtgcaattgttacacttacatatgatagtgaatggcaacgtgaccaatttttgtctcaagttaaaataccaaaaactattacagtgtctactggatttatgtctatatgacaaatcttgatactgcatccacaacattactggcgtgctttttgctttgcttttgtgtgcttttgtgtgtctgcctattaatacgtccgctgcttttgtctgtgtctacatacacatcattaatactattggtattactattgtggataacagcagcctctgcgtttaggtgttttattgtatatattatatttgtttatataccattatttttaatacatacacatgcacgctttttaattacataatgtatatgtacataatgtaattgttacatataattgttgtataccataacttactattttttcttttttatttttatatataatttttttttttgtttgtttgtttgttttttaataaactgttatcacttaacaatgcgacacaaacgttctgcaaaacgcacaaaacgtgcatcggctacccaactttataaaacatgcaaacaggcaggtacatgtccacctgacattatacctaaggttgaaggcaaaactattgctgatcaaatattacaatatggaagtatgggtgtattttttggtgggttaggaattggaacagggtcgggtacaggcggacgcactgggtatattccattgggaacaaggcctcccacagctacagatacacttgctcctgtaagaccccctttaacagtagatcctgtgggcccttctgatccttctatagtttctttagtggaagaaactagttttattgatgctggtgcaccaacatctgtaccttccatccccccagatgtatcaggatttagtattactacttcaactgataccacacctgctatattagatattaataatactgttactactgttactacacataataatcccactttcactgacccatctgtattgcagcctccaacacctgcagaaactggagggcattttacactttcatcatccactattagtacacataattatgaagaaattcctatggatacatttattgttagcacaaaccctaacacagtaactagtagcacacccataccagggtctcgcccagtggcacgcctaggattatatagtcgcacaacacaacaagttaaagttgtagaccctgcttttgtaaccactcccactaaacttattacatatgataatcctgcatatgaaggtatagatgtggataatacattatattttcctagtaatgataatagtattaatatagctccagatcctgactttttggatatagttgctttacataggccagcattaacctctaggcgtactggcattaggtacagtagaattggtaataaacaaacactacgtactcgtagtggaaaatctatatgtgctaaggtacattattattatgatttgagtactattgatcctgcagaagaaatagaattacaaactataacaccttctacatatactaccactttacatgcagcctcacctacttctattaataatggattatatgatatttatgcagatgactttattacagatacttctacaaccccggtaccatctgtaccctctacatctttatcaggttatattcctgcaaatacaacaattccttttggtggtgcatacaatattcctttagtatcaggtcctgatatacccattaatataactgaccaagctccttcattaattcctatagttccagggtctccacaatatacaattattgctgatgcaggtgacttttatttacatcctagttattacatgttacgaaaacgacgtaaacgtttaccatattttttttcagatgtctctttggctgcctagtgaggccactgtctacttgcctcctgtcccagtatctaaggttgtaagcacggatgaatatgttgcacgcacaaacatatattatcatgcaggaacatccagactacttgcagttggacatccctattttcctattaaaaaacctaacaataacaaaatattagttcctaaagtatcaggattacaatacagggtatttagaatacatttacctgaccccaataagtttggttttcctgacacctcattttataatccagatacacagcggctggtttgggcctgtgtaggtgttgaggtaggtcgtggtcagccattaggtgtgggcattagtggccatcctttattaaataaattggatgacacagaaaatgctagtgcttatgcagcaaatgcaggtgtggataatagagaatgtatatctatggattacaaacaaacacaattgtgtttaattggttgcaaaccacctataggggaacactggggcaaaggatccccatgtaccaatgttgcagtaaatccaggtgattgtccaccattagagttaataaacacagttattcaggatggtgatatggttgatactggctttggtgctatggactttactacattacaggctaacaaaagtgaagttccactggatatttgtacatctatttgcaaatatccagattatattaaaatggtgtcagaaccatatggcgacagcttatttttttatttacgaagggaacaaatgtttgttagacatttatttaatagggctggtgctgttggtgaaaatgtaccagacgatttatacattaaaggctctgggtctactgcaaatttagccagttcaaattattttcctacacctagtggttctatggttacctctgatgcccaaatattcaataaaccttattggttacaacgagcacagggccacaataatggcatttgttggggtaaccaactatttgttactgttgttgatactacacgcagtacaaatatgtcattatgtgctgccatatctacttcagaaactacatataaaaatactaactttaaggagtacctacgacatggggaggaatatgatttacagtttatttttcaactgtgcaaaataaccttaactgcagacgttatgacatacatacattctatgaattccactattttggaggactggaattttggtctacaaccccccccaggaggcacactagaagatacttataggtttgtaacatcccaggcaattgcttgtcaaaaacatacacctccagcacctaaagaagatccccttaaaaaatacactttttgggaagtaaatttaaaggaaaagttttctgcagacctagatcagtttcctttaggacgcaaatttttactacaagcaggattgaaggccaaaccaaaatttacattaggaaaacgaaaagctacacccaccacctcatctacctctacaactgctaaacgcaaaaaacgtaagctgtaagtattgtatgtatgttgaattagtgttgtttgttgtttatatgtttgtatgtgcttgtatgtgcttgtaaatattaagttgtatgtgtgtttgtatgtatggtataataaacacgtgtgtatgtgtttttaaatgcttgtgtaactattgtgtgatgcaacataaataaacttattgtttcaacacctactaattgtgttgtggttattcattgtatataaactatatttgctacatcctgtttttgttttatatatactatattttgtagcgccagcggccattttgtagcttcaaccgaattcggttgcatgctttttggcacaaaatgtgtttttttaaatagttctatgtcagcaactatggtttaaacttgtacgtttcctgcttgccatgcgtgccaaatccctgttttcctgacctgcactgcttgccaaccattccattgttttttacactgcactatgtgcaactactgaatcactatgtacattgtgtcatataaaataaatcactatgcgccaacgccttacataccgctgttaggcacatatttttggcttgttttaactaacctaattgcatatttggcataaggtttaaacttctaaggccaactaaatgtcaccctagttcatacatgaactgtgtaaaggttagtcatacattgttcatttgtaaaactgcacatgggtgtgtgcaaaccgttttgggttacacatttacaagcaacttatataataatactaaactacaataatccatgtataaaactaagggcgtaaccgaaatcggttgaaccgaaaccggttagtataaaagcagacattttatgcaccaaaagagaactgcaatgtttcaggacccacaggagcgacccggaaagttaccacagttatgcacagagctgcaaacaactatacatgatataatattagaatgtgtgtactgcaagcaacagttactgcgacgtgaggtatatgactttgcttttcgggatttatgcatagtatatagagatgggaatccatatgctgtatgtgataaatgtttaaagttttattctaaaattagtgagtatagacattattgttatagtgtgtatggaacaacattagaacagcaatacaacaaaccgttgtgtgatttgttaattaggtgtattaactgtcaaaagccactgtgtcctgaagaaaagcaaagacatctggacaaaaagcaaagattccataatataaggggtcggtggaccggtcgatgtatgtcttgttgcagatcatcaagaacacgtagagaaacccagctgtaatcatgcatggagatacacctacattgcatgaatatatgttagatttgcaaccagagacaactgatctctactgttatgagcaattaaatgacagctcagaggaggaggatgaaatagatggtccagctggacaagcagaaccggacagagcccattacaatattgtaaccttttgttgcaagtgtgactctacgcttcggttgtgcgtacaaagcacacacgtagacattcgtactttggaagacctgttaatgggcacactaggaattgtgtgccccatctgttctcagaaaccataatctacc

SEQ ID NO: 27 - DNA, 7906 bp, Homo sapiens
  source 1..7906: mol_type = genomic DNA; note = UNCseq1840
atggctgatcctgcaggtaccaatggggaagagggtacgggatgtaatggatggttttatgtagaggctgtagtggaaaaaaaaacaggggatgctatatcagatgacgagaacgaaaatgacagtgatacaggtgaagatttggtagattttatagtaaatgataatgattatttaacacaggcagaaacagagacagcacatgcgttgtttactgcacaggaagcaaaacaacatagagatgcagtacaggttctaaaacgaaagtatttgggtagtccacttagtgatattagtggatgtgtagacaataatattagtcctagattaaaagctatatgtatagaaaaacaaagtagagctgcaaaaaggagattatttgaaagcgaagacagcgggtatggcaatactgaagtggaaactcagcagatgttacaggtagaagggcgccatgagactgaaacaccatgtagtcagtatagtggtggaagtgggggtggttgcagtcagtacagtagtggaagtgggggagagggtgttagtgaaagacacactatatgccaaacaccacttacaaatattttaaatgtactaaaaactagtaatgcaaaggcagcaatgttagcaaaatttaaagagttatacggggtgagtttttcagaattagtaagaccatttaaaagtaataaatcaacgtgttgcgattggtgtattgctgcatttggacttacacccagtatagctgacagtataaaaacactattacaacaatattgtttatatttacacattcaaagtttagcatgttcatggggaatggttgtgttactattagtaagatataaatgtggaaaaaatagagaaacaattgaaaaattgctgtctaaactattatgtgtgtctccaatgtgtatgatgatagagcctccaaaattgcgtagtacagcagcagcattatattggtataaaacaggtatatcaaatattagtgaagtgtatggagacacgccagaatggatacaaagacaaacagtattacaacatagttttaatgattgtacatttgaattatcacagatggtacaatgggcctacgataatgacatagtagacgatagtgaaattgcatataaatatgcacaattggcagacactaatagtaatgcaagtgcctttctaaaaagtaattcacaggcaaaaattgtaaaggattgtgcaacaatgtgtagacattataaacgagcagaaaaaaaacaaatgagtatgagtcaatggataaaatatagatgtgatagggtagatgatggaggtgattggaagcaaattgttatgtttttaaggtatcaaggtgtagagtttatgtcatttttaactgcattaaaaagatttttgcaaggcatacctaaaaaaaattgcatattactatatggtgcagctaacacaggtaaatcattatttggtatgagtttaatgaaatttctgcaagggtctgtaatatgttttgtaaattctaaaagccatttttggttacaaccattagcagatgccaaaataggtatgttagatgatgctacagtgccctgttggaactacatagatgacaatttaagaaatgcattggatggaaatttagtttctatggatgtaaagcatagaccattggtacaactaaaatgccctccattattaattacatctaacattaatgctggtacagattctaggtggccttatttacataatagattggtggtgtttacatttcctaatgagtttccatttgacgaaaacggaaatccagtgtatgagcttaatgataagaactggaaatcctttttctcaaggacgtggtccagattaagtttgcacgaggacgaggacaaggaaaacgatggagactctttgccaacgtttaaatgtgtgtcaggacaaaatactaacacattatgaaaatgatagtacagacctacgtgaccatatagactattggaaacacatgcgcctagaatgtgctatttattacaaggccagagaaatgggatttaaacatattaaccaccaggtggtgccaacactggctgtatcaaagaataaagcattacaagcaattgaactgcaactaacgttagaaacaatatataactcacaatatagtaatgaaaagtggacattacaagacgttagccttgaagtgtatttaactgcaccaacaggatgtataaaaaaacatggatatacagtggaagtgcagtttgatggagacatatgcaatacaatgcattatacaaactggacacatatatatatttgtgaagaagcatcagtaactgtggtagagggtcaagttgactattatggtttatattatgttcatgaaggaatacgaacatattttgtgcagtttaaagatgatgcagaaaaatatagtaaaaataaagtatgggaagttcatgcgggtggtcaggtaatattatgtcctacatctgtgtttagcagcaacgaagtatcctctcctgaaattattaggcagcacttggccaaccaccccgccgcgacccataccaaagccgtcgccttgggcaccgaagaaacacagacgactatccagcgaccaagatcagagccagacaccggaaacccctgccacaccactaagttgttgcacagagactcagtggacagtgctccaatcctcactgcatttaacagctcacacaaaggacggattaactgtaatagtaacactacacccatagtacatttaaaaggtgatgctaatactttaaaatgtttaagatatagatttaaaaagcattgtacattgtatactgcagtgtcgtctacatggcattggacaggacataatgtaaaacataaaagtgcaattgttacacttacatatgatagtgaatggcaacgtgaccaatttttgtctcaagttaaaataccaaaaactattacagtgtctactggatttatgtctatatgacaaatcttgatacagcatccacaacattactggcgtgctttttgctttgcttttgtgtgcttttgtgtgtctgcctattaatacgtccgctgcttttgtctgtgtctacatacacatcattaataatattggtattactattgtggataacagcagcctctgcgtttaggtgttttattgtatatattatatttgtttatataccattatttttaatacatacacatgcacgctttttaattacataatgtatatgtacataatgtaattgttacatataattgttgtataccataacttactattttttgttttttattttcatatatattttttttttttgtttgtttgtttgttttttaataaactgttatcacttaacaatgcgacacaaacgttctgcaaaacgcacaaaacgtgcatcggctacccaactttataaaacatgcaaacaggcaggtacatgtccacctgacattatacctaaggttgaaggcaaaactattgctgatcaaatattacaatatggaagtatgggtgtattttttggtgggttaggaattggaacagggtcgggtacaggcggacgcactgggtatattccattgggaacaaggcctcccacagctacagatacacttgctcctgtaagaccccctttaacagtagatcctgtgggcccttctgatccttctatagtttctttagtggaagaaactagttttattgatgctggtgcaccaacatctgtaccttccattcccccagatgtatcaggatttagtattactacttcaactgataccacacctgctatattagatattaataatactgttactactgttactacacataataatcccactttcactgacccatctgtattgcagcctccaacacctgcagaaactggagggcattttacactttcatcatccactattagtacacataattatgaagaaattcctatggatacatttattgttagcacaaaccctaacacagtaactagtagcacacccataccagggtctcgcccagtggcacgcctaggattatatagtcgcacaacacaacaagttaaagttgtagaccctgcttttgtaaccactcccactaaacttattacatatgataatcctgcatatgaaggtatagatgtggataatacattatatttttctagtaatgataatagtattaatatagctccagatcctgactttttggatatagttgctttacataggccagcattaacctctaggcgtactggcattaggtacagtagaattggtaataaacaaacactacgtactcgtagtggaaaatctataggtgctaaggtacattattattatgatttcagtactattgatcctgcagaagaaatagaattacaaactataacaccttctacatatactaccacttcacatgcagcctcacctacttctattaataatggattatatgatatttatgcagatgactttattacagatacttctacaaccccggtaccatctgtaccctctacatctttatcaggttatattcctgcaaatacaacaattccttttggtggtgcatacaatattcctttagtatcaggtcctgatatacccattaatataactgaccaagctccttcattaattcctatagttccagggtctccacaatatacaattattgctgatgcaggtgacttttatttacatcctagttattacatgttacgaaaacgacgtaaacgtttaccatattttttttcagatgtctctttggctgcctagtgaggccactgtctacttgcctcctgtcccagtatctaaggttgtaagcacggatgaatatgttgcacgcacaaacatatattatcatgcaggaacatccagactacttgcagttggacatccctattttcctattaaaaaacctaacaataacaaaatattagttcctaaagtatcaggattacaatacagggtatttagaatacatttacctgaccccaataagtttggttttcctgacacctcattttataatccagatacacagcggctggtttgggcctgtgtaggtgttgaggtaggtcgtggtcagccattaggtgtgggcattagtggccatcctttattaaataaattggatgacacagaaaatgctagtgcttatgcagcaaatgcaggtgtggataatagagaatgtatatctatggattacaaacaaacacaattgtgtttaattggttgcaaaccacctataggggaacactggggcaaaggatccccatgtaccaatgttgcagtaaatccaggtgattgtccaccattagagttaataaacacagttattcaggatggtgatatggttgatactggctttggtgctatggactttactacattacaggctaacaaaagtgaagttccactggatatttgtacatctatttgcaaatatccagattatattaaaatggtgtcagaaccatatggcgacagcttatttttttatttacgaagggaacaaatgtttgttagacatttatttaatagggctggtactgttggtgaaaatgtaccagacgatttatacattaaaggctctgggtctactgcaaatttagccagttcaaattattttcctacacctagtggttctatggttacctctgatgcccaaatattcaataaaccttattggttacaacgagcacagggccacaataatggcatttgttggggtaaccaactatttgttactgttgttgatactacacgcagtaccaatatgtcattatgtgctgccatatctacttcagaaactacatataaaaatactaactttaaggagtacctacgacatggggaggaatatgatttacagtttatttttcaactgtgcaaaataaccttaactgcagacgttatgacatacatacattctatgaattccactattttggaggactggaattttggtctacaacctcccccaggaggcacactagaagatacttataggtttgtaacatcccaggcaattgcttgtcaaaaacatacacctccagcacctaaagaagatccccttaaaaaatacactttttgggaagtaaatttaaaggaaaagttttctgcagacctagatcagtttcctttaggacgcaaatttttactacaagcaggattgaaggccaaaccaaaatttacattaggaaaacgaaaagctacacccaccacctcatctacctctacaactgctaaacgcaaaaaacgtaagctgtaagtattgtatgtatgttgaattagtgttgtttgttgtgtatatgtttgtatgtgcttgtatgtgcttgtaaatattaagttgtatgtgtgtttgtatgtatggtataataaacacgtgtgtatgtgtttttaaatgcttgtgtaactattgtgtcatgcaccataaataaacttattgtttcaacacctactaattgtgttgtggttattcattgtatataaactatatttgctacatcctgtttttgttttatatatactatattttgtagcgccagcggccattttgtagcttcaaccgaattcggttgcatgctttttggcacaaaatgtgtttttttaaattgttctatgtcagcaactatggtttaaacttgtacgtttcctgcttgccatgcgtgccaaatccctgttttcctgacctgcactgcttgccaaccattccattgttttttacactgcactatgtgcaactactgaatcactatgtacattgtgtcatataaaataaatcactatgcgccaacgccttacataccgctgttaggcacatatttttggcttgttttaactaacctaattgcatatttggcataaggtttaaacttctaaggccaactaaatgtcaccctagttcatacatgaactgtgtaaaggttagtcatacattgttcatttgtaaaactgcacatgggtgtgtgcaaaccgttttgggttacacatttacaagcaacttatataataatactaaactacaataattcatgtataaaactaagggcgtaaccgaaatcggttgaaccgaaaccggttagtataaaagcagacattttatgcaccaaaagagaactgcaatgtttcaggacccacaggagcgacccagaaagttaccacagttatgcacagagctgcaaacaactatacatgatataatattagaatgtgtgtactgcaagcaacagttactgcgacgtgaggtatatgactttgcttttcgggatttatgcatagtatatagagatgggaatccatatgctgtatgtgataaatgtttaaagttttattctaaaattagtgagtatagacattattgttatagtttgtatggaacaacattagaacagcaatacaacaaaccgttgtgtgatttgttaattaggtgtattaactgtcaaaagccactgtgtcctgaagaaaagcaaagacatctggacaaaaagcaaagattccataatataaggggtcggtggaccggtcgatgtatgtcttgttgcagatcatcaagaacacgtagagaaacccagctgtaatcatgcatggagatacacctacattgcatgaatatatgttagatttgcaaccagagacaactgatctctactgttatgagcaattaaatgacagctcagaggaggaggatgaaatagatggtccagctggacaagcagaaccggacagagcccattacaatattgtaaccttttgttgcaagtgtgactctacgcttcggttgtgcgtacaaagcacacacgtagacattcgtactttggaagacctgttaatgggcacactaggaattgtgtgccccatctgttctcagaaaccataatctacc

SEQ ID NO: 28 - DNA, 7906 bp, Homo sapiens
  source 1..7906: mol_type = genomic DNA; note = UNCseq1849
atggctgatcctgcaggtaccaatggggaagagggtacgggatgtaatggatggttttatgtagaggctgtagtggaaaaaaaaacaggggatgctatatcagatgacgagaacgaaaatgacagtgatacaggtgaagatttggtagattttatagtaaatgataatgattatttaacacaggcagaaacagagacagcacatgcgttgtttactgcacaggaagcaaaacaacatagagatgcagtacaggttctaaaacgaaagtatttgggtagtccacttagtgatattagtggatgtgtagacaataatattagtcctagattaaaagctatatgtatagaaaaacaaagtagagctgcaaaaaggagattatttgaaagcgaagacagcgggtatggcaatactgaagtggaaactcagcagatgttacaggtagaagggcgccatgagactgaaacaccatgtagtcagtatagtggtggaagtgggggtggttgcagtcagtacagtagtggaagtgggggagagggtgttagtgaaagacacactatatgccaaacaccacttacaaatattttaaatgtactaaaaactagtaatgcaaaggcagcaatgttagcaaaatttaaagagttatacggggtgagttttacagaattagtaagaccatttaaaagtaataaatcaacgtgttgcgattggtgtattgctgcatttggacttacacccagtatagctgacagtataaaaacactattacaacaatattgtttatatttacacattcaaagtttagcatgttcatggggaatggttgtgttactattagtaagatataaatgtggaaaaaatagagaaacaattgaaaaattgctgtctaaactattatgtgtgtctccaatgtgtatgatgatagagcctccaaaattgcgtagtacagcagcagcattatattggtataaaacaggtatatcaaatattagtgaagtgtatggagacacgccagaatggatacaaagacaaacagtattacaacatagttttaatgattgtacatttgaattatcacagatggtacaatgggcctacgataatgacatagtagacgatagtgaaattgcatataaatatgcacaattggcagacactaatagtaatgcaagtgcctttctaaaaagtaattcacaggcaaaaattgtaaaggattgtgcaacaatgtgtagacattataaacgagcagaaaaaaaacaaatgagtatgagtcaatggataaaatatagatgtgatagggtagatgatggaggtgattggaagcaaattgttatgtttttaaggtatcaaggtgtagagtttatgtcatttttaactgcattaaaaagatttttgcaaggcatacctaaaaaaaattgcatattactatatggtgcagctaacacaggtaaatcattatttggtatgagtttaatgaaatttctgcaagggtctgtaatatgttttgtaaattctaaaagccatttttggttacaaccattagcagatgccaaaataggtatgttagatgatgctacagtgccctgttggaactacatagatgacaatttaagaaatgcattggatggaaatttagtttctatggatgtaaagcatagaccattggtacaactaaaatgccctccattattaattacatctaacattaatgctggtacagattctaggtggccttatttacataatagattggtggtgtttacatttcctaatgagtttccatttgacgaaaacggaaatccagtgtatgagcttaatgataagaactggaaatcctttttctcaaggacgtggtccagattaagtttgcacgaggacgaggacaaggaaaacgatggagactctttgccaacgtttaaatgtgtgtcaggacaaaatactaacacattatgaaaatgatagtacagacctacgtgaccatatagactattggaaacacatgcgcctagaatgtgctatttattacaaggccagagaaatgggatttaaacatattaaccaccaggtggtgccaacgctggctgtatcaaagaataaagcattacaagcaattgaactgcaactaacgttagaaacaatatataactcacaatatagtaatgaaaagtggacattacaagacgttagccttgaagtgtatttaactgcaccaacaggatgtataaaaaaacatggatatacagtggaagtgcagtttgatggagacatatgcaatacaatgcattatacaaactggacacatatatatatttgtgaagaagcatcagtaactgtggtagagggtcaagttgactattatggtttatattatgttcatgaaggaatacgaacatattttgtgcagtttaaagatgatgcagaaaaatatagtaaaaataaagtatgggaagttcatgcgggtggtcaggtaatattatgtcctacatctgtgtttagcagcaacgaagtatcctctcctgaaactattaggcagcacttggccaaccactccgccgcgacccataccaaagccgtcgccttgggcaccaaagaaacacagacgactatccagcgaccaagatcagagccagacaccggaaacccctgccacaccactaagttgttgcacagagactcagtggacagtgctccaatcctcactgcatttaacagctcacacaaaggacggattaactgtaatagtaacactacacccatagtacatttaaaaggtgatgctaatactttaaaatgtttaagatatagatttaaaaagcattgtacattgtatactgcagtgtcgtctacatggcattggacaggacataatgtaaaacataaaagtgcaattgttacacttacatatgatagtgaatggcaacgtgaccaatttttgtctcaagttaaaataccaaaaactattacagtgtctactggatttatgtctatatgacaaatcttgatactgcatccacaacattactggcgtgctttttgctttgcttttgtgtgcttttgtgtgtctgcctattaatacgtccgctgcttttgtctgtgtctacatacacatcattaatactattggtattactattgtggataacagcagcctctgcgtttaggtgttttattgtatatattgtatttgtttatataccattatttttaatacatacacatgcacgctttttaattacataatgtatatgtacataatgtaattgttacatataattgttgtataccataacttactattttttcttttttatttttatatataatttttttttttgtttgtttgtttgttttttaataaactgttatcacttaacaatgcgacacagacgttctgcaaaacgcacaaaacgtgcatcggctacccaactttataaaacatgcaaacaggcaggtacatgtccacctgacattatacctaaggttgaaggcaaaactattgctgatcaaatattacaatatggaagtatgggtgtattttttggtgggttaggaattggaacagggtcgggtacaggcggacgcactgggtatattccattgggaacaaggcctcccacagctacagatacacttgctcctgtaagaccccctttaacagtagatcctgtgggcccttctgatccttctatagtttctttagtggaagaaactagttttattgatgctggtgcaccaacatctgtaccttccattcccccagatgtatcaggatttagtattactacttcaactgataccacacctgctatattagatattaataatactgttactactgttactacacataataatcccactttcactgacccatctgtattgcagcctccaacacctgcagaaactggagggcattttacactttcatcatccactattagtacacataattatgaagaaattcctatggatacatttattgttagcacaaaccctaacacagtaactagtagcacacccataccagggtctcgcccagtggcacgcctaggattatatagtcgcacaacacaacaagttaaagttgtagaccctgcttttgtaaccactcccactaaacttattacatatgataatcctgcatatgaaggtatagatgtggataatacagtatattttcctagtaatgataatagtattaatatagctccagatcctgactttttggatatagttgctttacataggccagcattaacttctaggcgtactggcattaggtacagtagaattggtaataaacaaacactacgtactcgtagtggaaaatctataggtgctaaggtacattattattatgatttcagtactattgatcctgcagaagaaatagaattacaaactataacaccttctacatatactaccacttcacatgcagcctcacctacttctattaataatggattatatgatatttatgcagatgactttattacagatacttctacaaccccggtaccatctgtaccctctacatctttatcaggttatattcctgcaaatacaacaattccttttggtggtgcatacaatattcctttagtatcaggtcctgatatacccattaatataactgaccaagctccttcattaattcctatagttccagggtctccacaatatacaattattgctgatgcaggtgacttttatttacatcctagttattacatgttacgaaaacgacgtaaacgtttaccatattttttttcagatgtctctttggctgcctagtgaggccactgtctacttgcctcctgtcccagtatctaaggttgtaagcacggatgaatatgttgcacgcacaaacatatattatcatgcaggaacatccagactacttgcagttggacatccctattttcctattaaaaaacctaacaataacaaaatattagttcctaaagtatcaggattacaatacagggtatttagaatacatttacctgaccccaataagtttggttttcctgacacctcattttataatccagatacacagcggctggtttgggcctgtgtaggtgttgaggtaggtcgtggtcagccattaggtgtgggcattagtggccatcctttattaaataaattggatgacacagaaaatgctagtgcttatgcagcaaatgcaggtgtggataatagagaatgtatatctatggattacaaacaaacacaattgtgtttaattggttgcaaaccacctataggggaacactggggcaaaggatccccatgtaccaatgttgcagtaaatccaggtgattgtccaccattagagttaataaacacagttattcaggatggtgatatggttgatactggctttggtgctatggactttactacattacaggctaacaaaagtgaagttccactggatatttgtacatctatttgcaaatatccagattatattaaaatggtgtcagaaccatatggcgacagcttatttttttatttacgaagggaacaaatgtttgttagacatttatttaatagggctggtgctgttggtgaaaatgtaccagacgatttatacattaaaggctctgggtctactgcaaatttagccagttcaaattattttcctacacctagtggttctatggttacctctgatgcccaaatattcaataaaccttattggttacaacgagcacagggccacaataatggcatttgttggggtaaccaactatttgttactgttgttgatactacacgcagtacaaatatgtcattatgtgctgccatatctacttcagaaactacatataaaaatactaactttaaggagtacctacgacatggggaggaatatgatttacagtttatttttcaactgtgcaaaataaccttaactgcagacgttatgacatacatacattctatgaattccactattttggaggactggaattttggtctacaacctcccccaggaggcacactagaagatacttataggtttgtaacatcccaggcaattgcttgtcaaaaacatacacctccagcacctaaagaagatccccttaaaaaatacactttttgggaagtaaatttaaaggaaaagttttctgcagacctagatcagtttcctttaggacgcaaatttttactacaagcaggattgaaggccaaaccaaaatttacattaggaaaacgaaaagctacacccaccacctcatctacctctacaactgctaaacgcaaaaaacgtaagctgtaagtattgtatgtatgttgaattagtgttgtttgttgtttatatgtttgtatgtgcttgtatgtgcttgtaaatattaagttgtatgtgtgtttgtatgtatggtataataaacacgtgtgtatgtgtttttaaatgcttgtgtaactattgtgtcatgcaacataaataaacttattgtttcaacacctactaattgtgttgtggttattcattgtatataaactatatttgctacatcctgtttttgttttatatatactatattttgtagcgccagcggccattttgtagcttcaaccgaattcggttgcatgctttttggcacaaaatgtgtttttttaaatagttctatgtcagcaactatagtttaaacttgtacgtttcctgcttgccatgcgtgccaaatccctgttttcctgacctgcactgcttgccaaccattccattgttttttacactgcactatgtgcaactactgaatcactatgtacattgtgtcatataaaataaatcactatgcgccaacgccttacataccgctgttaggcacatatttttggcttgttttaactaacctaattgcatatttggcataaggtttaaacttctaaggccaactaaatgtcaccctagttcatacatgaactgtgtaaaggttagtcatacattgttcatttgtaaaactgcacatgggtgtgtgcaaaccgttttgggttacacatttacaagcaacttatataataatactaaactacaataattcatgtataaaactaagggcgtaaccgaaatcggttgaaccgaaaccggttagtataaaagcagacattttatgcaccaaaagagaactgcaatgtttcaggacccacaggagcgacccagaaagttaccacagttatgcacagagctgcaaacaactatacatgatataatattagaatgtgtgtactgcaagcaacagttactgcgacgtgaggtatatgactttgcttttcgggatttatgcatagtatatagagatgggaatccatatgctgtatgtgataaatgtttaaagttttattctaaaattagtgagtatagacattattgttatagtttgtatggaacaacattagaacagcaatacaacaaaccgttgtgtgatttgttaattaggtgtattaactgtcaaaagccactgtgtcctgaagaaaagcaaagacatctggacaaaaagcaaagattccataatataaggggtcggtggaccggtcgatgtatgtcttgttgcagatcatcaagaacacgtagagaaacccagctgtaatcatgcatggagatacacctacattgcatgaatatatgttagatttgcaaccagagacaactgatctctactgttatgagcaattaaatgacagctcagaggaggaggatgaaatagatggtccagctggacaagcagaaccggacagagcccattacaatattgtaaccttttgttgcaagtgtgactctacgcttcggttgtgcgtacaaagcacacacgtagacattcgtactttggaagacctgttaatgggcacactaggaattgtgtgccccatctgttctcagaaaccataatctacc

SEQ ID NO: 29 - DNA, 7906 bp, Homo sapiens
  source 1..7906: mol_type = genomic DNA; note = UNCseq1851
atggctgatcctgcaggtaccaatggggaagagggtacgggatgtaatggatggttttatgtagaggctgtagtggaaaaaaaaacaggggatgctatatcagatgacgagaacgaaaatgacagtgatacaggtgaagatttggtagattttatagtaaatgataatgattatttaacacaggcagaaacagagacagcacatgcgttgtttactgcacaggaagcaaaacaacatagagatgcagtacaggttctaaaacgaaagtatttgggtagtccacttagtgatattagtggatgtgtagacaataatattagtcctagattaaaagctatatgtatagaaaaacaaagtagagctgcaaaaaggagattatttgaaagcgaagacagcgggtatggcaatactgaagtggaaactcagcagatgttacaggtagaagggcgccatgagactgaaacaccatgtagtcagtatagtggtggaagtgggggtggttgcagtcagtacagtagtggaagtgggggagagggtgttagtgaaagacacactatatgccaaacaccacttacaaatattttaaatgtactaaaaactagtaatgcaaaggcagcaatgttagcaaaatttaaagagttatacggggtgagtttttcagaattagtaagaccatttaaaagtaataaatcaacgtgttgcgattggtgtattgctgcatttggacttacacccagtatagctgacagtataaaaacactattacaacaatattgtttatatttacacattcaaagtttagcatgttcatggggaatggttgtgttactattagtaagatataaatgtggaaaaaatagagaaacaattgaaaaattgctgtctaaactattatgtgtgtctccaatgtgtatgatgatagagcctccaaaattgcgtagtacagcagcagcattatattggtataaaacaggtatatcaaatattagtgaagtgtatggagacacgccagaatggatacaaagacaaacagtattacaacatagttttaatgattgtacatttgaattatcacagatggtacaatgggcctacgataatgacatagtagacgatagtgaaattgcatataaatatgcacaattggcagacactaatagtaatgcaagtgcctttctaaaaagtaattcacaggcaaaaattgtaaaggattgtgcaacaatgtgtagacattataaacgagcagaaaaaaaacaaatgagtatgagtcaatggataaaatatagatgtgatagggtagatgatggaggtgattggaagcaaattgttatgtttttaaggtatcaaggtgtagagtttatgtcatttttaactgcattaaaaagatttttgcaaggcatacctaaaaaaaattgcatattactatatggtgcagctaacacaggtaaatcattatttggtatgagtttaatgaaatttctgcaagggtctgtaatatgttttgtaaattctaaaagccatttttggttacaaccattagcagatgccaaaataggtatgttagatgatgctacagtgccctgttggaactacatagatgacaatttaagaaatgcattggatggaaatttagtttctatggatgtaaagcatagaccattggtacaactaaaatgccctccattattaattacatctaacattaatgctggtacagattctaggtggccttatttacataatagattggtggtgtttacatttcctaatgagtttccatttgacgaaaacggaaatccagtgtatgagcttaatgataagaactggaaatcctttttctcaaggacgtggtccagattaagtttgcacgaggacgaggacaaggaaaacgatggagactctttgccaacgtttaaatgtgtgtcaggacaaaatactaacacattatgaaaatgatagtacagacctacgtgaccatatagactattggaaacacatgcgcctagaatgtgctatttattacaaggccagagaaatgggatttaaacatattaaccaccaggtggtgccaacactggctgtatcaaagaataaagcattacaagcaattgaactgcaactaacgttagaaacaatatataactcacaatatagtaatgaaaagtggacattacaagacgttagccttgaagtgtatttaactgcaccaacaggatgtataaaaaaacatggatatacagtggaagtgcagtttgatggagacatatgcaatacaatgcattatacaaactggacacatatatatatttgtgaagaagcatcagtaactgtggtagagggtcaagttgactattatggtttatattatgttcatgaaggaatacgaacatattttgtgcagtttaaagatgatgcagaaaaatatagtaaaaataaagtatgggaagttcatgcgggtggtcaggtaatattatgtcctacatctgtgtttagcagcaacgaagtatcctctcctgaaattattaggcagcacttggccaaccaccccgccgcgacccataccaaagccgtcgccttgggcaccgaagaaacacagacgactatccagcgaccaagatcagagccagacaccggaaacccctgccacaccactaagttgttgcacagagactcagtggacagtgctccaatcctcactgcatttaacagctcacacaaaggacggattaactgtaatagtaacactacacccatagtacatttaaaaggtgatgctaatactttaaaatgtttaagatatagatttaaaaagcattgtacattgtatactgcagtgtcgtctacatggcattggacaggacataatgtaaaacataaaagtgcaattgttacacttacatatgatagtgaatggcaacgtgaccaatttttgtctcaagttaaaataccaaaaactattacagtgtctactggatttatgtctatatgacaaatcttgatactgcatccacaacattactggcgtgctttttgctttgcttttgtgtgcttttgtgtgtctgcctattaatacgtccgctgcttttgtctgtgtctacatacacatcattaataatattggtattactattgtggataacagcagcctctgcgtttaggtgttttattgtatatattatatttgtttatataccattatttttaatacatacacatgcacgctttttaattacataatgtatatgtacataatgtaattgttacatataattgttgtataccataacttactattttttcttttttattttcatatataatttttttttttgtttgtttgtttgttttttaataaactgttattacttaacaatgcgacacaaacgttctgcaaaacgcacaaaacgtgcatcggctacccaactttataaaacatgcaaacaggcaggtacatgtccacctgacattatacctaaggttgaaggcaaaactattgctgatcaaatattacaatatggaagtatgggtgtattttttggtgggttaggaattggaacagggtcgggtacaggcggacgcactgggtatatttcattgggaacaaggcctcccacagctacagatacacttgctcctgtaagaccccctttaacagtagatcctgtgggcccttctgatccttctatagtttctttagtggaagaaactagttttattgatgctggtgcaccaacatctgtaccttccattcccccagatgtatcaggatttagtattactacttcaactgataccacacctgctatattagatattaataatactgttactactgttactacacataataatcccactttcactgacccatctgtattgcagcctccaacacctgcagaaactggagggcattttacactttcatcatccactattagtacacataattatgaagaaattcctatggatacatttattgttagcacaaaccctaacacagtaactagtagcacacccataccagggtctcgcccagtggcacgcctaggattatatagtcgcacaacacaacaggttaaagttgtagaccctgcttttgtaaccactcccactaaacttattacatatgataatcctgcatatgaaggtatagatgtggataatacattatatttttctagtaatgataatagtattaatatagctccagatcctgactttttggatatagttgctttacataggccagcattaacctctaggcgtactggcattaggtacagtagaattggtaataaacaaacactacgtactcgtagtggaaaatctataggtgctaaggtacattattattatgatttaagtactattgatcctgcagaagaaatagaattacaaactataacaccttctacatatactaccacttcacatgcagcctcacctacttctattaataatggattatatgatatttatgcagatgactttattacagatacttctacaaccccggtaccatctgtaccctctacatctttatcaggttatattcctgcaaatacaacaattccttttggtggtgcatacaatattcctttagtatcaggtcctgatatacccattaatataactgaccaagctccttcattaattcctatagttccagggtctccacaatatacaattattgctgatgcaggtgacttttatttacatcctagttattacatgttacgaaaacgacgtaaacgtttaccatattttttttcagatgtctctttggctgcctagtgaggccactgtctacttgcctcctgtcccagtatctaaggttgtaagcacggatgaatatgttgcacgcacaaacatatattatcatgcaggaacatccagactacttgcagttggacatccctattttcctattaaaaaacctaacaataacaaaatattagttcctaaagtatcaggattacaatacagggtatttagaatacatttacctgaccccaataagtttggttttcctgacacctcattttataatccagatacacagcggctggtttgggcctgtgtaggtgttgaggtaggtcgtggtcagccattaggtgtgggcattagtggccatcctttattaaataaattggatgacacagaaaatgctagtgcttatgcagcaaatgcaggtgtggataatagagaatgtatatctatggattacaaacaaacacaattgtgtttaattggttgcaaaccacctataggggaacactggggcaaaggatccccatgtaccaatgttgcagtaaatccaggtgattgtccaccattagagttaataaacacagttattcaggatggtgatatggttgatactggctttggtgctatggactttactacattacaggctaacaaaagtgaagttccactggatatttgtacatctatttgcaaatatccagattatattaaaatggtgtcagaaccatatggcgacagcttatttttttatttacgaagggaacaaatgtttgttagacatttatttaatagggctggtactgttggtgaaaatgtaccagacgatttatacattaaaggctctgggtctactgcaaatttagccagttcaaattattttcctacacctagtggttctatggttacctctgatgcccaaatattcaataaaccttattggttacaacgagcacagggccacaataatggcatttgttggggtaaccaactatttgttactgttgttgatactacacgcagtacaaatatgtcattatgtgctgccatatctacttcagaaactacatataaaaatactaactttaaggagtacctacgacatggggaggaatatgatttacagtttatttttcaactgtgcaaaataaccttaactgcagacgttatgacatacatacattctatgaattccactattttggaggactggaattttggtctacaacctcccccaggaggcacactagaagatacttataggtttgtaacatcccaggcaattgcttgtcaaaaacatacacctccagcacctaaagaagatccccttaaaaaatacactttttgggaagtaaatttaaaggaaaagttttctgcagacctagatcagtttcctttaggacgcaaatttttactacaagcaggattgaaggccaaaccaaaatttacattaggaaaacgaaaagctacacccaccacctcatctacctctacaactgctaaacgcaaaaaacgtaagctgtaagtattgtatgtatgttgaattagtgttgtttgttgtgtatatgtttgtatgtgcttgtatgtgcttgtaaatattaagttgtatgtgtgtttgtatgtatggtataataaacacgtgtgtatgtgtttttaaatgcttgtgtaactattgtgtcatgcaacataaataaacttattgtttcaacacctactaattgtgttgtggttattcattgtatataaactatatttgctacatcctgtttttgttttatatatactatattttgtagcgccagcggccattttgtagcttcaaccgaattcggttgcatgctttttggcacaaaatgtgtttttttaaatagttctatgtcagcaactatggtttaaacttgtacgtttcctgcttgccatgcgtgccaaatccctgttttcctgacctgcactgcttgccaaccattccattgttttttacactgcactatgtgcaactactgaatcactatgtacattgtgtcatataaaataaatcactatgcgccaacgccttacataccgctgttaggcacatatttttggcttgttttaactaacctaattgcatatttggcataaggtttaaacttctaaggccaactaaatgtcaccctagttcatacatgaactgtgtaaaggttagtcatacattgttcatttgtaaaactgcacatgggtgtgtgcaaaccgttttgggttacacatttacaagcaacttatataataatactaaactacaataattcatgtataaaactaagggcgtaaccgaaatcggttgaaccgaaaccggttagtataaaagcagacattttatgcaccaaaagagaactgcaatgtttcaggacccacaggagcgacccagaaagttaccacagttatgcacagagctgcaaacaactatacatgatataatattagaatgtgtgtactgcaagcaacagttactgcgacgtgaggtatatgactttgcttttcgggatttatgcatagtatatagagatgggaatccatatgctgtatgtgataaatgtttaaagttttattctaaaattagtgagtatagacattattgttatagtttgtatggaacaacattagaacagcaatacaacaaaccgttgtgtgatttgttaattaggtgtattaactgtcaaaagccactgtgtcctgaagaaaagcaaagacatctggacaaaaagcaaagattccataatataaggggtcggtggaccggtcgatgtatgtcttgttgcagatcatcaagaacacgtagagaaacccagctgtaatcatgcatggagatacacctacattgcatgaatatatgttagatttgcaaccagagacaactgatctctactgttatgagcaattaaatgacagctcagaggaggaggatgaaatagatggtccagctggacaagcagaaccggacagagcccattacaatattgtaaccttttgttgcaagtgtgactctacgcttcggttgtgcgtacaaagcacacacgtagacattcgtactttggaagacctgttaatgggcacactaggaattgtgtgccccatctgttctcagaaaccataatctacc

SEQ ID NO: 30 - DNA, 7906 bp, Homo sapiens
  source 1..7906: mol_type = genomic DNA; note = UNCseq1864
atggctgatcctgcaggtaccaatggggaagagggtacgggatgtaatggatggttctatgtagaggctgtagtggaaaaaaaaacaggggatgctatatcagatgacgagaacgaaaatgacagtgatacaggtgaagatttggtagattttatagtaaatgataatgattatttaacacaggcagaaacagagacagcacatgcgttgtttactgcacaggaagcaaaagaacatagagatgcagtacaggttctaaaacgaaagtatttgggtagtccacttagtgatattagtgaatgtgtagacaataatattagtcctagattaaaagccatatgtatagaaaaacaaagcagagctgcaaaaaggagattatttgaaagcgaagacagcgggtatggcaatactgaagtggaaactcagcagatgttacaggtagaagggcgccatgagactgaaacaccatgtagtcagtatagtggtggaagtgggggtggtagcagtcagtatagtagtggaagtgggggagagggtgttagtgaaagacacactatatgcgaaacaccacttacaaatattttaaatgtactaaaaactagtaatgcaaaggcagcaatgctagcaaaatttaaagagttatacggggtgagttttacagaattagtaagaccatttaaaagtaataaatcaacgtgttgcgattggtgtattgctgcatttggacttacacccagtatagctgacagtataaaaacattattacaacaatattgtttatatttacacattcaaagtttagcgtgttcatggggaatggttgtgttactattagtaagatataaatgtggaaaaaatagagaaacaattgaaaaattgatgtctaaactattatgtgtgtctccaatgtgtatgatgatagagcctccaaaattgcgtagtacagcagcagcattatattggtataaaacaggtatgtcaaatattagtgaagtgtatggagacacgccagaatggatacaaagacaaacagtattacaacatagttttaatgattgtacatttgaattatcacagatggtacaatgggcctacgataatgacatagtagacgatagtgaaattgcatataaatatgcacaattggcagacactaatagtaatgcaagtgcctttttaaaaagtaattcacaggcaaaaattgtaaaggattgtgcaacaatgtgtagacattataaacgagcagaaaaaaaacaaatgagtatgagtcaatggataaaatatagatgtgatagggtagatgatggaggtgattggaagcaaattgttatgtttttaaggtatcaaggtgtagactttatgtcatttttaagtgcattaaaaaaattcctgcaaggtatacctaaaaaaaattgcatattattatatggtgcagctaacacaggtaaatcattatttggtatgagtttaatgaaatttttgcaagggtctgtaatatgttttgtaaattctaaaagccatttttggttacaaccattagcagatgccaaaataggtatgttagatgatgctacagtgccctgttggaactacatagatgacaatttaagaaatgcattggatggaaatttagtttctatggatgtaaagcatagaccattggtacaactaaaatgccctccattattaattacatctaacattaatgctggtacagattccaggtggccttatttacataatcgattggtggtgtttacatttccaaatgagtttccatttgacgaaaacggaaatccagtgtatgagcttaatgataagaactggaaatcctttttctcaaggacgtggtccagattaagtttgcacgaggacgaggacaaggaaaacgatggagactctttgccaacgtttaaatgtgtgtcaggacaaaatactaacacattatgaaaatgatagtacagacctacgtgaccatatagactattggaaacaaatgcgcctagaatgtgctatttattacaaggccagagaaatgggatttaaacatattaaccaccaggtggtgccaacactggctgtatcaaagaataaagcattacaagcaattgaactgcaactaacgttagaaacaatatataactcacaatatagtaatgaaaagtggacattacaagacgttagccttgaagtgtatttaactgcaccaacaggatgtataaaaaaacatggatatacagtggaagtgcagtttgatggagacatatgcaatacaatgcattatacaaactggaaatatatatatatttgtgaagaaacatcagtaactgtggtagagggtcaagttgactattatggtatatattatgttcatgaaggaatacaaacatattttgtgcagtttaaagatgatgcagaaaaatatagtaaaaataaagtatgggaagttcatgcgggtggtcaggtaatattatgtcctacatctgtgtttagcagcgacgaagtaccctctgctgaaattattaggcagcacttggccaaccactccaccgcgacccataccaaagccgtcgccttgggcaccaaagaaacacagacgactatccagcgaccaagatcagagccagacaccggaaacccctgccacaccaacaagttgttgcacagagactccgtggacagtgctccaatcctcactgcagttaacagctcacacaaaggacggattaactgtaatagtaacactacacccatagtacatttaaaaggtgatgctaatactttaaaatgtttaagatatagatttaaaaagcattgtaaattgtatacagcagtgtcgtccacatggcattggacaggacataatgtaaaacataaaagtgcaattgttacacttacatatgatagtgaatgtcaacgtgaacaatttttgtctcaagtgaaaataccaaaaactattacagtgtctactggatttatgtctatatgacaaaccttgatactgcatccacaacattactggcgtgctttttgctttgcttttgtgtgcttttgtgtgtctgcctattaatacgtccgctgcttttgtctgtgtctacatacacatcattaatactattggtattattattgtggataactgcagcctctgcatttaggtgttttattgtatatattgtatttgtttatataccattatttttaatacatacacatgcacgctttttaattacataatgtatatgtacataatgtaattcttacatataattgttgtataccataaattactattttttcttttttattttcatatataatttttttttttgtttgtttgtttgttttttaataaactgttattacttaacaatgcgacacaaacgttctgcaaaacgcacaaaacgtgcatcggccacccaactttataaaacatgcaaacaggcaggtacatgtccacctgacattatacctaaggttgaaggcaaaactattgctgatcaaatattacaatatggaagtatgggtgtattttttggtgggttaggaattggaacagggtctggtacaggcggacgcactgggtacattccattaggaacaaggcctcccacagctacagatacacttgctcctgtaagaccccctttaacagtagatcctgtgggcccttctgatccttctatagtttctttagtggaagaaactagttttattgatgctggtgcaccaacacctgtaccttccattcccccagatgtatcaggatttagtattacaacttcaactgataccacacctgctatattagatattaataatactgttactactgttactacacataataatcccacttttactgacccatctgtattgcagcctccaacacctgcagaaactggagggcattttacactttcatcatccactattagtacacataattatgaagaaattcctatggatacatttattgttagcacaaaccctaacacagtaactagtagcacacccataccggggtctcgcccagtggcacgcctaggattatatagtcgcacaacacaacaagttaaagttgtggaccctgcttttgtaaccgctcccactaaacttattacatatgataatcctgcatatgaaggtatagatgtggataatacattttattttcctagtaatgataatagtattaatatagctcctgatcctgactttttggatatagttgctttacataggccagcattaacctctaggcgtactggcattagatacagtagacttggtaataaacaaacactacgtactcgtagtggaaaatctataggtgctaaggtacattattattatgatttaagtactattaatcctgcagaagaaatagaattacaaactataacaccttctacatatacaaccacttcacatgcagcctcacccacttctattaataatggattatatgatatttatgcagatgactttattacagatactgttacaaccccagtaccagctataccctctacatccttatcaggttatattcctgcaaatacaacaattccttttggtggtgcatacaatattcctttagtatcaggtcctgatatacctattaatacaactgaccaaactccttcattaattcctatagttccggggtctccacaatatacaattattgctgatggaggtgacttttatttacatcctagttattacatgttacgaaaacgacgtaaacgtttaccatattttttttcagatgtctctttggctgcctagtgaggccactgtctacttgcctcctgtcccagtatctaaagttgtaagcacggatgaatatgttgcacgcacaaacatatattatcatgcaggaacatccagactacttgcagttggacatccctattttcctattaaaaaacctaacaataacaaaatattagttcctaaagtatcaggattacaatacagggtatttagaatatatttacctgaccccaataagtttggttttcctgacacctcattttacaatccagatacacagcggctggtttgggcctgtgtaggtgttgaggtaggtcgtggtcagccattaggtgtgggcattagtggccatcctttattaaataaattggatgacacagaaaatgctagtgcttatgcagcaaatgcaggtgtggataatagagaatgtatatctatggattacaaacaaacacaattgtgtttaattggttgcaaaccacctataggggaacactggggcaaaggatccccatgtaacaatgttacagtaaatccaggtgattgtccaccattagagttaataaacacagttattcaggatggtgatatggttgataccggctttggtgctatggactttactacattacaggctaacaaaagtgaagttccactggatatttgtacgtctatttgcaaatatccagattatattaaaatggtgtcagaaccatatggcgacagcttatttttttatttacgaagggaacaaatgtttgttagacatttatttaatagggctggtgctgttggtgaaaatgtaccagacgatttatacattaaaggctctgggtctactgcaaatttagccagttcaaattattttcctacacctagtggttctatggttacctctgatgcccaaatatttaataaaccttattggttacaacgagcacagggccacaataatggcatttgttggggtaaccaactatttgttactgttgttgatactacacgcagtacaaatatgtcattatgtgctgccatatctacttcagaacctacatataaaaatactaactttaaagagtacctacgacatggggaggaatatgatttacagtttatttttcaactgtgcaaaataaccttaactgcagacgttatgacatacatacattctatgaattccactattttggaggactggaattttggtttacaacctcctccaggaggcacactagaagatacttataggtttgtaacatcccaggcaattgcttgtcaaaaacatacacctccagcacctaaagaagatccccttaaaaaatatactttttgggaagtaaatttaaaagaaaagttttctgcagacctagatcagtttcctttaggacgcaaatttttactacaagcaggatttaaggccaaaccaaaatttacattaggaaaacgaaaagctacacccaccacctcatctacctctacaactgctaaacgcaaaaaacgtaagctgtaagtattgtatgtatgttgaattagtgttgtttgttgtttatatgtttgtatgtgcttgtatgtgcttgtaactattacgttgtatgtgtgtttgtatgtatggtataataaacacgtgtgtatgtgtttttaaatgcttgtgtaactattgtgtcatgcaacataaataaacttattgtttcaacacctactaattgtgttgtggttattcattgtatataaactatatttgctacatcctgtttttgttttatatatactatattttgtagcgccagcggccattttgtagcttcaaccgaattcggttgcatgctttttggcacaaactgtatttttttaaatagttctatgtcagcaactatagtttaaacttgtacgtttcctgcttgccatgcgtgccaaatccctgttttcctgacctgcactgcttgccaaccattccattgttttttacactgcactatgtgcaactactgaatcactatgtacattgtgtcatataaaataaattactatgcgccaacgccttaaataccgctgttaggcacatatttttggcttgttttaactcacctaattgcatatttggcataaggtttaaacttttaaggccaactaaatgtcaccttagttcatacatgaactgtgtaaaggttagtcatacattgttcatttttaaaactgcacatgggtgtgtgcaaaccgttttgggttacacatttacaagcaacttatataataatactaaactacaataattcatgtataaaactaagggcgtaaccgaaatcggttgaaccgaaaccggttagtataaaagcagacattttatgcaccaaaagagaactgcaatgtttcaggacccacaggagcgacccagaaagttaccacatttatgcacagagctgcaaacaactatacatgatataatattagaatgtgtgtactgcaagcaacagttactgcgacgtgaggtatatgactttgcttttcgggatttatgcatagtatatagagatgggaatccatatgcagtgtgtgataaatgtttaaagttttattctaaaattagtgagtatagatattattgttatagtgtgtatggaacaacattagaacagcaatacaacaaaccgttgtgtgatttgttaattaggtgtattaactgtcaaaagccactgtgtcctgaagaaaagcaaagacatctggacaaaaagcaaagattccataatataaggggtcggtggaccggtcgatgtatgtcttgttgcagatcatcaagaacacgtagagaaacccagctgtaatcatgcatggagatacacctacattgcatgaatatatgttagatttgcaaccagagacaactgatctctactgttatgagcaattaaatgacagctcagaggaggaggatgaaatagatggtccagctggacaagcagaaccggacagagcccattacaatattgtaaccttttgttgcaagtgtgactctacgcttcggttgtgcgtacaaagcacacacgtagacatccgtacgttggaagacctgttaatgggcacactaggaattgtgtgccccatctgttctcagaaaccataatctacc

SEQ ID NO: 31 - DNA, 7906 bp, Homo sapiens
  source 1..7906: mol_type = genomic DNA; note = UNCseq1867
atggctgatcctgcaggtaccaatggggaagagggtacgggatgtaatggatggttttatgtagaggctgtagtggaaaaaaaaacaggggatgctatatcagatgacgagaacgaaaatgacagtgatacaggtgaagatttggtagattttatagtaaatgataatgattatttaacacaggcagaaacagagacagcacatgcgttgtttactgcacaggaagcaaaagaacatagagatgcagtacaggttctaaaacgaaagtatttgggtagtccacttagtgatattagtgaatgtgtagacaataatattagtcctagattaaaagccatatgtatagaaaaacaaagcagagctgcaaaaaggagattatttgaaagcgaagacagcgggtatggcaatactgaagtggaaactcagcagatgttacaggtagaagggcgccatgagactgaaacaccatgtagtcagtatagtggtggaagtgggggtggtagcagtcagtatagtagtggaagtgggggagagggtgttagtgaaagacacactatatgcgaaacaccacttacaaatattttaaatgtactaaaaactagtaatgcaaaggcagcaatgctagcaaaatttaaagagttatacggggtgagttttacagaattagtaagaccatttaaaagtaataaatcaacgtgttgcgattggtgtattgctgcatttggacttacacccagtatagctgacagtataaaaacattattacaacaatattgtttatatttacacattcaaagtttagcgtgttcatggggaatggttgtgttactattagtaagatataaatgtggaaaaaatagagaaacaattgaaaaattgatgtctaaactattatgtgtgtctccaatgtgtatgatgatagagcctccaaaattgcgtagtacagcagcagcattatattggtataaaacaggtatgtcaaatattagtgaagtgtatggagacacgccagaatggatacaaagacaaacagtattacaacatagttttaatgattgtacatttgaattatcacagatggtacaatgggcctacgataatgacatagtagacgatagtgaaattgcatataaatatgcacaattggcagacactaatagtaatgcaagtgcctttttaaaaagtaattcacaggcaaaaattgtaaaggattgtgcaacaatgtgtagacattataaacgagcagaaaaaaaacaaatgagtatgagtcaatggataaaatatagatgtgatagggtagatgatggaggtgattggaagcaaattgttatgtttttaaggtatcaaggtgtagactttatgtcatttttaagtgcattaaaaaaattcctgcaaggtatacctaaaaaaaattgcatattattatatggtgcagctaacacaggtaaatcattatttggtatgagtttaatgaaatttttgcaagggtctgtaatatgttttgtaaattctaaaagccatttttggttacaaccattagcagatgccaaaataggtatgttagatgatgctacagtgccctgttggaactacatagatgacaatttaagaaatgcattggatggaaatttagtttctatggatgtaaagcatagaccattggtacaactaaaatgccctccattattaattacatctaacattaatgctggtacagattccaggtggccttatttacataatcgattggtggtgtttacatttccaaatgagtttccatttgacgaaaacggaaatccagtgtatgagcttaatgataagaactggaaatcctttttctcaaggacgtggtccagattaagtttgcacgaggacgaggacaaggaaaacgatggagactctttgccaacgtttaaatgtgtgtcaggacaaaatactaacacattatgaaaatgatagtacagacctacgtgaccatatagactattggaaacaaatgcgcctagaatgtgctatttattacaaggccagagaaatgggatttaaacatattaaccaccaggtggtgccaacactggctgtatcaaagaataaagcattacaagcaattgaactgcaactaacgttagaaacaatatataactcacaatatagtaatgaaaagtggacattacaagacgttagccttgaagtgtatttaactgcaccaacaggatgtataaaaaaacatggatatacagtggaagtgcagtttgatggagacatatgcaatacaatgcattatacaaactggaaatatatatatatttgtgaagaaacatcagtaactgtggtagagggtcaagttgactattatggtatatattatgttcatgaaggaatacaaacatattttgtgcagtttaaagatgatgcagaaaaatatagtaaaaataaagtatgggaagttcatgcgggtggtcaggtaatattatgtcctacatctgtgtttagcagcgacgaagtaccctctgctgaaattattaggcagcacttggccaaccactccaccgcgacccataccaaagccgtcgccttgggcaccaaagaaacacagacgactatccagcgaccaagatcagagccagacaccggaaacccctgccacaccaacaagttgttgcacagagactccgtggacagtgctccaatcctcactgcagttaacagctcacacaaaggacggattaactgtaatagtaacactacacccatagtacatttaaaaggtgatgctaatactttaaaatgtttaagatatagatttaaaaagcattgtaaattgtatacagcagtgtcgtccacatggcattggacaggacataatgtaaaacataaaagtgcaattgttacacttacatatgatagtgaatgtcaacgtgaacaatttttgtctcaagtgaaaataccaaaaactattacagtgtctactggatttatgtctatatgacaaaccttgatactgcatccacaacattactggcgtgctttttgctttgcttttgtgtgcttttgtgtgtctgcctattaatacgtccgctgcttttgtctgtgtctacatacacatcattaatactattggtaatattattgtggataacagcagcctctgcatttaggtgttttattgtatatattgtatttgtttatataccattatttttaatacatacacatgcacgcttcttaattacataatgtatatgtacataatgtaattgttacatataattgttgtataccataacttactattttttcttttttattttcatatataatttttttttttgtttgtttgtttgttttttaataaactgttattacttaacaatgcgacacaaacgttctgcaaaacgcacaaaacgtgcatcggctacccaactttataaaacatgcaaacaggcaggtacatgtccacctgacattatacctaaggttgaaggcaaaactattgctgatcaaatattacaatatggaagtatgggtgtattttttggtgggttaggaattggaacagggtctggtacaggcggacgcactgggtacattccattaggaacaaggcctcccacagctacagatacacttgctcctgtaagaccccctttaacagtagatcctgtgggcccttctgatccttctatagtttctttagtggaagaaactagttttattgatgctggtgcaccaacacctgtaccttccattcccccagatgtatcaggatttagtattacaacttcaactgataccacacctgctatattagatattaataatactgttactactgttactacacataataatcccacttttactgacccatctgtattgcagcctccaacacctgcagaaactggagggcattttacactttcatcatccactattagtacacataattatgaagaaattcctatggatacatttattgttagcacaaaccctaacacagtaactagtagcacacccataccggggtctcgcccagtggcacgcctaggattatatagtcgcacaacacaacaagttaaagttgtggaccctgcttttgtaaccgctcccactaaacttattacatatgataatcctgcatatgaaggtatagatgtggataatacattttattttcctagtaatgataatagtattaatatagctcctgatcctgactttttggatatagttgctttacataggccagcattaacctctaggcgtactggcattagatacagtagacttggtaataaacaaacactacgtactcgtagtggaaaatctataggtgctaaggtacattattattatgatttaagtactattaatcctgcagaagaaatagaattacaaactataacaccttctacatatacaaccacttcacatgcagcctcacccacttctattaataatggattatatgatatttatgcagatgactttattacagatactgttacaaccccagtaccagctataccctctacatccttatcaggttatattcctgcaaatacaacaattccttttggtggtgcatacaatattcctttagtatcaggtcctgatatacctattaatacaactgaccaaaccccttcattaattcctatagttccagggtctccacaatatacaattattgctgatggaggtgacttttatttacatcctagttattacatgttacgaaaacgacgtaaacgtttaccatattttttttcagatgtctctttggctgcctagtgaggccactgtctacttgcctcctgtcccagtatctaaagttgtaagcacggatgaatatgttgcacgcacaaacatatattatcatgcaggaacatccagactacttgcagttggacatccctattttcctattaaaaaacctaacaataacaaaatattagttcctaaagtatcaggattacaatacagggtatttagaatatatttacctgaccccaataagtttggttttcctgacacctcattttacaatccagatacacagcggctggtttgggcctgtgtaggtgttgaggtaggtcgtggtcagccattaggtgtgggcattagtggccatcctttattaaataaattggatgacacagaaaatgctagtgcttatgcagcaaatgcaggtgtggataatagagaatgtatatctatggattacaaacaaacacaattgtgtttaattggttgcaaaccacctataggggaacactggggcaaaggatccccatgtaacaatgttgcagtaaatccaggtgattgtccaccattagagttaataaacacagttattcaggatggtgatatggttgataccggctttggtgctatggactttactacattacaggctaacaaaagtgaagttccactggatatttgtacgtctatttgcaaatatccagattatattaaaatggtgtcagaaccatatggcgacagcttatttttttatttacgaagggaacaaatgtttgttagacatttatttaatagggctggtgctgttggtgaaaatgtaccagacgatttatacattaaaggctctgggtctactgcaaatttagccagttcaaattattttcctacacctagtggttctatggttacctctgatgcccaaatatttaataaaccttattggttacaacgagcacagggccacaataatggcatttgttggggtaaccaactatttgttactgttgttgatactacacgcagtacaaatatgtcattatgtgctgccatatctacttcagaacctacatataaaaatactaactttaaagagtacctacgacatggggaggaatatgatttacagtttatttttcaactgtgcaaaataaccttaactgcagacgttatgacatacatacattctatgaattccactattttggaggactggaattttggtttacaacctcctccaggaggcacactagaagatacttataggtttgtaacatcccaggcaattgcttgtcaaaaacatacacctccagcacctaaagaagatccccttaaaaaatatactttttgggaagtaaatttaaaagaaaagttttctgcagacctagatcagtttcctttaggacgcaaatttttactacaagcaggatttaaggccaaaccaaaatttacattaggaaaaagaaaagctacacccaccacctcatctacctctacaactgctaaacgcaaaaaacgtaagcagtaagtattgtatgtatgttgaattagtgttgtttgttgtttatatgtttgtatgtgcttgtatgtgcttgtaactattacgttgtatgtgtgtttgtatgtatggtataataaacacgtgtgtatgtgtttttaaatgcttgtgtaactattgtgtcatgcaacataaataaacttattgtttcaacacctactaattgtgttgtggttattcattgtatataaactatatttgctacatcctgtttttgttgtatatatactatattttgtagcgccagcggccattttgtagcttcaaccgaattcggttgcatgctttttggcacaaactgtatttttttaaatagttctatgtcagcaactatagtttaaacttgtacgtttcctgcttgccatgcgtgccaaatccctgttttcctgacctgcactgcttgccaaccattccattgttttttacactgcactatgtgcaactactgaatcactatgtacattgtgtcatataaaataaattactatgcgccaacgccttaaataccgctgttaggcacatatttttggcttgttttaactcacctaattgcatatttggcataaggtttaaacttttaaggccaactaaatgtcaccttagttcatacatgaactgtgtaaaggttagtcatacattgttcatttttaaaactgcacatgggtgtgtgcaaaccgttttgggttacacatttacaagcaacttatataataatactaaactacaataattcatgtataaaactaagggcgtaaccgaaatcggttgaaccgaaaccggttagtataaaagcagacattttatgcaccaaaagagaactgcaatgtttcaggacccacaggagcgacccagaaagttaccacatttatgcacagagctgcaaacaactatacatgatataatattagaatgtgtgtactgcaagcaacagttactgcgacgtgaggtatatgactttgcttttcgggatttatgcatagtatatagagatgggaatccatatgcagtgtgtgataaatgtttaaagttttattctaaaattagtgagtatagatattattgttatagtgtgtatggaacaacattagaacagcaatacaacaaaccgttgtgtgatttgttaattaggtgtattaactgtcaaaagccactgtgtcctgaagaaaagcaaagacatctggacaaaaagcaaagattccataatataaggggtcggtggaccggtcgatgtatgtcttgttgcagatcatcaagaacacgtagagaaacccagctgtaatcatgcatggagatacacctacattgcatgaatatatgttagatttgcaaccagagacaactgatctctactgttatgagcaattaaatgacagctcagaggaggaggatgaaatagatggtccagctggacaagcagaaccggacagagcccattacaatattgtaaccttttgttgcaagtgtgactctacgcttcggttgtgcgtacaaagcacacacgtagacatccgtacgttggaagacctgttaatgggcacactaggaattgtgtgccccatctgttctcagaaaccataatctacc

SEQ ID NO: 32 - DNA, 7906 bp, Homo sapiens
  source 1..7906: mol_type = genomic DNA; note = UNCseq1891
atggctgatcctgcaggtaccaatggggaagagggtacgggatgtaatggatggttttatgtagaggctgtagtggaaaaaaaaacaggggatgctatatcagatgacgagaacgaaaatgacagtgatacaggtgaagatttggtagattttatagtaaatgataatgattatttaacacaggcagaaacagagacagcacatgcgttgtttactgcacaggaagcaaaacaacatagagatgcagtacaggttctaaaacgaaagtatttgggtagtccacttagtgatattagtggatgtgtagacaataatattagtcctagattaaaagctatatgtatagaaaaacaaagtagagctgcaaaaaggagattatttgaaagcgaagacagcgggtatggcaatactgaagtggaaactcagcagatgttacaggtagaagggcgccatgagactgaaacaccatgtagtcagtatagtggtggaagtgggggtggttgcagtcagtacagtagtggaagtgggggagagggtgttagtgaaagacacactatatgccaaacaccacttacaaatattttaaatgtactaaaaactagtaatgcaaaggcagcaatgttagcaaaatttaaagagttatacggggtgagttttacagaattagtaagaccatttaaaagtaataaatcaacgtgttgcgattggtgtattgctgcatttggacttacacccagtatagctgacagtataaaaacactattacaacaatattgtttatatttacacattcaaagtttagcatgttcatggggaatggttgtgttactattagtaagatataaatgtggaaaaaatagagaaacaattgaaaaattgctgtctaaactattatgtgtgtctccaatgtgtatgatgatagagcctccaaaattgcgtagtacagcagcagcattatattggtataaaacaggtatatcaaatattagtgaagtgtatggagacacgccagaatggatacaaagacaaacagtattacaacatagttttaatgattgtacatttgaattatcacagatggtacaatgggcctacgataatgacatagtagacgatagtgaaattgcatataaatatgcacaattggcagacactaatagtaatgcaagtgcctttctaaaaagtaattcacaggcaaaaattgtaaaggattgtgcaacaatgtgtagacattataaacgagcagaaaaaaaacaaatgagtatgagtcaatggataaaatatagatgtgatagggtagatgatggaggtgattggaagcaaattgttatgtttttaaggtatcaaggtgtagagtttatgtcatttttaactgcattaaaaagatttttgcaaggcatacctaaaaaaaattgcatattactatatggtgcagctaacacaggtaaatcattatttggtatgagtttaatgaaatttctgcaagggtctgtaatatgttttgtaaattctaaaagccatttttggttacaaccattagcagatgccaaaataggtatgttagatgatgctacagtgccctgttggaactatatagatgacaatttaagaaatgcattggatggaaatttagtttctatggatgtaaagcatagaccattggtacaactaaaatgccctccattattaattacatctaacattaatgctggtacagattctaggtggccttatttacataatagattggtggtgtttacatttcctaatgagtttccatttgacgaaaacggaaatccagtgtatgagcttaatgataagaactggaaatcctttttctcaaggacgtggtccagattaagtttgcacgaggacgaggacaaggaaaacgatggagactctttgccaacgtttaaatgtgtgtcaggacaaaatactaacacattatgaaaatgatagtacagacctacgtgaccatatagactattggaaacacatgcgcctagaatgtgctatttattacaaggccagagaaatgggatttaaacatattaaccaccaggtggtgccaacgctggctgtatcaaagaataaagcattacaagcaattgaactgcaactaacgttagaaacaatatataactcacaatatagtaatgaaaagtggacattacaagacgttagccttgaagtgtatttaactgcaccaacaggatgtataaaaaaacatggatatacagtggaagtgcagtttgatggagacatatgcaatacaatgcattatacaaactggacacatatatatatttgtgaagaagcatcagtaactgtggtagagggtcaagttgactattatggtttatattatgttcatgaaggaatacgaacatattttgtgcagtttaaagatgatgcagaaaaatatagtaaaaataaagtatgggaagttcatgcgggtggtcaggtaatattatgtcctacatctgtgtttagcagcaacgaagtatcctctcctgaaactattaggcagcacttggccaaccactccgccgcgacccataccaaagccgtcgccttgggcaccgaagaaacacagacgactatccagcgaccaagatcagagccagacaccggaaacccctgccacaccactaagttgttgcacagagactcagtggacagtgctccaatcctcactgcatttaacagctcacacaaaggacggattaactgtaatagtaacactacacccatagtacatttaaaaggtgatgctaatactttaaaatgtttaagatatagatttaaaaagcattgtaaattgtatactgcagtgtcgtctacatggcattggacaggacataatgtaaaacataaaagtgcaattgttacacttacatatgatagtgaatggcaacgtgaccaatttttgtctcaagttaaaataccaaaaactattacagtgtctactggatttatgtctatatgacaaatcttgatactgcatccacaacattactggcgtgctttttgctttgcttttgtgtgcttttgtgtgtctgcctattaatacgtccgctgcttttgtctgtgtctacatacacatcattaatactattggtattactattgtggataacagcagcctctgcgtttaggtgttttattgtatatattgtatttgtttatataccattatttttaatacatacacatgcacgctttttaattacataatgtatatgtacataatgtaattgttacatataattgttgtataccataacttactattttttcttttttatttttatatataatttttttttttgtttgtttgtttgttttttaataaactgttatcatttaacaatgcgacacaaacgttctgcaaaacgcacaaaacgtgcatcggctacccaactttataaaacatgcaaacaggcaggtacatgtccacctgacattatacctaaggttgaaggcaaaactattgctgatcaaatattacaatatggaagtatgggtgtattttttggtgggttaggaattggaacagggtcgggtacaggcggacgcactgggtatattccattgggaacaaggcctcccacagctacagatacacttgctcctgtaagaccccctttaacagtagatcctgtgggcccttctgatccttctatagtttctttagtggaagaaactagttttattgatgctggtgcaccaacatctgtaccttccatccccccagatgtatcaggatttagtattactacttcaactgataccacacctgctatattagatattaataatactgttactactgttactacacataataatcccactttcactgacccatctgtattgcagcctccaacacctgcagaaactggagggcattttacactttcatcatccactattagtacacataattatgaagaaattcctatggatacatttattgttagcacaaaccctaacacagtaactagtagcacacccataccagggtctcgcccagtggcacgcctaggattatatagtcgcacaacacaacaagttaaagttgtagaccctgcttttgtaaccactcccactaaacttattacatatgataatcctgcatatgaaggtatagatgtggataatacattatattttcctagtaatgataatagtattaatatagctccagatcctgactttttggatatagttgctttacataggccagcattaacctctaggcgtactggcattaggtacagtagaattggtaataaacaaacactacgtactcgtagtggaaaatctataggtgctaaggtacattattattatgatttgagtactattgatcctgcagaagaaatagaattacaaactataacaccttctacatatactaccacttcacatgcagcctcacctacttctattaataatggattatatgatatttatgcagatgactttattacagatacttctacaaccccggtaccatctgtaccctctacatctttatcaggttatattcctgcaaatacaacaattccttttggtggtgcatacaatattcctttagtatcaggtcctgatatacccattaatataactgaccaagctccttcattaattcctatagttccagggtctccacaatatacaattattgctgatgcaggtgacttttatttacatcctagttattacatgttacgaaaacgacgtaaacgtttaccatattttttttcagatgtctctttggctgcctagtgaggccactgtctacttgcctcctgtcccagtatctaaggttgtaagcacggatgaatatgttgcacgcacaaacatatattatcatgcaggaacatccagactacttgcagttggacatccctattttcctattaaaaaacctaacaataacaaaatattagttcctaaagtatcaggattacaatacagggtatttagaatacatttacctgaccccaataagtttggttttcctgacacctcattttataatccagatacacagcggctggtttgggcctgtgtaggtgttgaggtaggtcgtggtcagccattaggtgtgggcattagtggccatcctttattaaataaattggatgacacagaaaatgctagtgcttatgcagcaaatgcaggtgtggataatagagaatgtatatctatggattacaaacaaacacaattgtgtttaattggttgcaaaccacctataggggaacactggggcaaaggatccccatgtaccaatgttgcagtaaatccaggtgattgtccaccattagagttaataaacacagttattcaggatggtgatatggttgatactggctttggtgctatggactttactacattacaggctaacaaaagtgaagttccactggatatttgtacatctatttgcaaatatccagattatattaaaatggtgtcagaaccatatggcgacagcttatttttttatttacgaagggaacaaatgtttgttagacatttatttaatagggctggtgctgttggtgaaaatgtaccagacgatttatacattaaaggctctgggtctactgcaaatttagccagttcaaattattttcctacacctagtggttctatggttacctctgatgcccaaatattcaataaaccttattggttacaacgagcacagggccacaataatggcatttgttggggtaaccaactatttgttactgttgttgatactacacgcagtacaaatatgtcattatgtgctgccatatctacttcagaaactacatataaaaatactaactttaaggagtacctacgacatggggaggaatatgatttacagtttatttttcaactgtgcaaaataaccttaactgcagacgttatgacatacatacattctatgaattccactattttggaggactggaattttggtctacaaccccccccaggaggcacactagaagatacttataggtttgtaacatcccaggcaattgcttgtcaaaaacatacacctccagcacctaaagaagatccccttaaaaaatacactttttgggaagtaaatttaaaggaaaagttttctgcagacctagatcagtttcctttaggacgcaaatttttactacaagcaggattgaaggccaaaccaaaatttacattaggaaaacgaaaagctacacccaccacctcatctacctctacaactgctaaacgcaaaaaacgtaagctgtaagtattgtatgtatgttgaattagtgttgtttgttgtttatatgtttgtatgtgcttgtatgtgcttgtaaatattaagttgtatgtgtgtttgtatgtatggtataataaacacgtgtgtatgtgtttttaaatgcttgtgtaactattgtgtgatgcaacataaataaacttattgtttcaacacctactaattgtgttgtggttattcattgtatataaactatatttgctacatcctgtttttgttttatatatactatattttgtagcgccagcggccattttgtagcttcaaccgaattcggttgcatgctttttggcacaaaatgtgtttttttaaatagttctatgtcagcaactatagtttaaacttgtacgtttcctgcttgccatgcgtgccaaatccctgttttcctgacctgcactgcttgccaaccattccattgttttttacactgcactatgtgcaactactgaatcactatgtacattgtgtcatataaaataaatcactatgcgccaacgccttacataccgctgttaggcacatatttttggcttgttttaactaacctaattgcatatttggcataaggtttaaacttctaaggccaactaaatgtcaccctagttcatacatgaactgtgtaaaggttagtcatacattgttcatttgtaaaactgcacatgggtgtgtgcaaaccgttttaggttacacatttacaagcaacttatataataatactaaactacaataatccatgtataaaactaagggcgtaaccgaaatcggttgaaccgaaaccggttagtataaaagcagacattttatgcaccaaaagagaactgcaatgtttcaggacccacaggagcgacccggaaagttaccacagttatgcacagagctgcaaacaactatacatgatataatattagaatgtgtgtactgcaagcaacagttactgcgacgtgaggtatatgactttgcttttcgggatttatgcatagtatatagagatgggaatccatatgctgtatgtgataaatgtttaaagttttattctaaaattagtgagtatagacattattgttatagtgtgtatggaacaacattagaacagcaatacaacaaaccgttgtgtgatttgttaattaggtgtattaactgtcaaaagccactgtgtcctgaagaaaagcaaagacatctggacaaaaagcaaagattccataatataaggggtcggtggaccggtcgatgtatgtcttgttgcagatcatcaagaacacgtagagaaacccagctgtaatcatgcatggagatacacctacattgcatgaatatatgttagatttgcaaccagagacaactgatctctactgttatgagcaattaaatgacagctcagaggaggaggatgaaatagatggtccagctggacaagcagaaccggacagagcccattacaatattgtaaccttttgttgcaagtgtgactctacgcttcggttgtgcgtacaaagcacacacgtagacattcgtactttggaagacctgttaatgggcacactaggaattgtgtgccccatctgttctcagaaaccataatctacc

SEQ ID NO: 33 - DNA, 7906 bp, Homo sapiens
  source 1..7906: mol_type = genomic DNA; note = UNCseq1897
atggctgatcctgcaggtaccaatggggaagagggtacgggatgtaatggatggttttatgtagaggctgtagtggaaaaaaaaacaggggatgctatatcagatgacgagaacgaaaatgacagtgatacaggtgaagatttggtagattttatagtaaatgataatgattatttaacacaggcagaaacagagacagcacatgcgttgtttactgcacaggaagcaaaacaacatagagatgcagtacaggttctaaaacgaaagtatttgggtagtccacttagtgatattagtggatgtgtagacaataatattagtcctagattaaaagctatatgtatagaaaaacaaagtagagctgcaaaaaggagattatttgaaagcgaagacagcgggtatggcaatactgaagtggaaactcagcagatgttacaggtagaagggcgccatgagactgaaacaccatgtagtcagtatagtggtggaagtgggggtggttgcagtcagtacagtagtggaagtgggggagagggtgttagtgaaagacacactatatgccaaacaccacttacaaatattttaaatgtactaaaaactagtaatgcaaaggcagcaatgttagcaaaatttaaagagttatacggggtgagtttttcagaattagtaagaccatttaaaagtaataaatcaacgtgttgcgattggtgtattgctgcatttggacttacacccagtatagctgacagtataaaaacactattacaacaatattgtttatatttacacattcaaagtttagcatgttcatggggaatggttgtgttactattagtaagatataaatgtggaaaaaatagagaaacaattgaaaaattgctgtctaaactattatgtgtgtctccaatgtgtatgatgatagagcctccaaaattgcgtagtacagcagcagcattatattggtataaaacaggtatatcaaatattagtgaagtgtatggagacacgccagaatggatacaaagacaaacagtattacaacatagttttaatgattgtacatttgaattatcacagatggtacaatgggcctacgataatgacatagtagacgatagtgaaattgcatataaatatgcacaattggcagacactaatagtaatgcaagtgcctttctaaaaagtaattcacaggcaaaaattgtaaaggattgtgcaacaatgtgtagacattataaacgagcagaaaaaaaacaaatgagtatgagtcaatggataaaatatagatgtgatagggtagatgatggaggtgattggaagcaaattgttatgtttttaaggtatcaaggtgtagagtttatgtcatttttaactgcattaaaaagatttttgcaaggcatacctaaaaaaaattgcatattactatatggtgcagctaacacaggtaaatcattatttggtatgagtttaatgaaatttctgcaagggtctgtaatatgttttgtaaattctaaaagccatttttggttacaaccattagcagatgccaaaataggtatgttagatgatgctacagtgccctgttggaactacatagatgacaatttaagaaatgcattggatggaaatttagtttctatggatgtaaagcatagaccattggtacaactaaaatgccctccattattaattacatctaacattaatgctggtacagattctaggtggccttatttacataatagattggtggtgtttacatttcctaatgagtttccatttgacgaaaacggaaatccagtgtatgagcttaatgataagaactggaaatcctttttctcaaggacgtggtccagattaagtttgcacgaggacgaggacaaggaaaacgatggagactctttgccaacgtttaaatgtgtgtcaggacaaaatactaacacattatgaaaatgatagtacagacctacgtgaccatatagactattggaaacacatgcgcctagaatgtgctatttattacaaggccagagaaatgggatttaaacatattaaccaccaggtggtgccaacactggctgtatcaaagaataaagcattacaagcaattgaactgcaactaacgttagaaacaatatataactcacaatatagtaatgaaaagtggacattacaagacgttagccttgaagtgtatttaactgcaccaacaggatgtataaaaaaacatggatatacagtggaagtgcagtttgatggagacatatgcaatacaatgcattatacaaactggacacatatatatatttgtgaagaagcatcagtaactgtggtagagggtcaagttgactattatggtttatattatgttcatgaaggaatacgaacatattttgtgcagtttaaagatgatgcagaaaaatatagtaaaaataaagtatgggaagttcatgcgggtggtcaggtaatattatgtcctacatctgtgtttagcagcaacgaagtatcctctcctgaaattattaggcagcacttggccaaccaccccgccgcgacccataccaaagccgtcgccttgggcaccgaagaaacacagacgactatccagcgaccaagatcagagccagacaccggaaacccctgccacaccactaagttgttgcacagagactcagtggacagtgctccaatcctcactgcatttaacagctcacacaaaggacggattaactgtaatagtaacactacacccatagtacatttaaaaggtgatgctaatactttaaaatgtttaagatatagatttaaaaagcattgtacattgtatactgcagtgtcgtctacatggcattggacaggacataatgtaaaacataaaagtgcaattgttacacttacatatgatagtgaatggcaacgtgaccaatttttgtctcaagttaaaataccaaaaactattacagtgtctactggatttatgtctatatgacaaatcttgatacagcatccacaacattactggcgtgctttttgctttgcttttgtgtgcttttgtgtgtctgcctattaatacgtccgctgcttttgtctgtgtctacatacacatcattaataatattggtattactattgtggataacagcagcctctgcgtttaggtgttttattgtatatattatatttgtttatataccattatttttaatacatacacatgcacgctttttaattacataatgtatatgtacataatgtaattgttacatataattgttgtataccataacttactattttttgttttttattttcatatatattttttttttttgtttgtttgtttgttttttaataaactgttatcacttaacaatgcgacacaaacgttctgcaaaacgcacaaaacgtgcatcggctacccaactttataaaacatgcaaacaggcaggtacatgtccacctgacattatacctaaggttgaaggcaaaactattgctgatcaaatattacaatatggaagtatgggtgtattttttggtgggttaggaattggaacagggtcgggtacaggcggacgcactgggtatattccattgggaacaaggcctcccacagctacagatacacttgctcctgtaagaccccctttaacagtagatcctgtgggcccttctgatccttctatagtttctttagtggaagaaactagttttattgatgctggtgcaccaacatctgtaccttccattcccccagatgtatcaggatttagtattactacttcaactgataccacacctgctatattagatattaataatactgttactactgttactacacataataatcccactttcactgacccatctgtattgcagcctccaacacctgcagaaactggagggcattttacactttcatcatccactattagtacacataattatgaagaaattcctatggatacatttattgttagcacaaaccctaacacagtaactagtagcacacccataccagggtctcgcccagtggcacgcctaggattatatagtcgcacaacacaacaagttaaagttgtagaccctgcttttgtaaccactcccactaaacttattacatatgataatcctgcatatgaaggtatagatgtggataatacattatatttttctagtaatgataatagtattaatatagctccagatcctgactttttggatatagttgctttacataggccagcattaacctctaggcgtactggcattaggtacagtagaattggtaataaacaaacactacgtactcgtagtggaaaatctataggtgctaaggtacattattattatgatttcagtactattgatcctgcagaagaaatagaattacaaactataacaccttctacatatactaccacttcacatgcagcctcacctacttctattaataatggattatatgatatttatgcagatgactttattacagatacttctacaaccccggtaccatctgtaccctctacatctttatcaggttatattcctgcaaatacaacaattccttttggtggtgcatacaatattcctttagtatcaggtcctgatatacccattaatataactgaccaagctccttcattaattcctatagttccagggtctccacaatataccattattgctgatgcaggtgacttttatttacatcctagttattacatgttacgaaaacgacgtaaacgtttaccatattttttttcagatgtctctttggctgcctagtgaggccactgtctacttgcctcctgtcccagtatctaaggttgtaagcacggatgaatatgttgcacgcacaaacatatattatcatgcaggaacatccagactacttgcagttggacatccctattttcctattaaaaaacctaacaataacaaaatattagttcctaaagtatcaggattacaatacagggtatttagaatacatttacctgaccccaataagtttggttttcctgacacctcattttataatccagatacacagcggctggtttgggcctgtgtaggtgttgaggtaggtcgtggtcagccattaggtgtgggcattagtggccatcctttattaaataaattggatgacacggaaaatgctagtgcttatgcagcaaatgcaggtgtggataatagagaatgtatatctatggattacaaacaaacacaattgtgtttaattggttgcaaaccacctataggggaacactggggcaaaggatccccatgtaccaatgttgcagtaaatccaggtgattgtccaccattagagttaataaacacagttattcaggatggtgatatggttgatactggctttggtgctatggactttactacattacaggctaacaaaagtgaagttccactggatatttgtacatctatttgcaaatatccagattatattaaaatggtgtcagaaccatatggcgacagcttatttttttatttacgaagggaacaaatgtttgttagacatttatttaatagggctggtactgttggtgaaaatgtaccagacgatttatacattaaaggctctgggtctactgcaaatttagccagttcaaattattttcctacacctagtggttctatggttacctctgatgcccaaatattcaataaaccttattggttacaacgagcacagggccacaataatggcatttgttggggtaaccaactatttgttactgttgttgatactacacgcagtacaaatatgtcattatgtgctgccatatctacttcagaaactacatataaaaatactaactttaaggagtacctacgacatggggaggaatatgatttacagtttatttttcaactgtgcaaaataaccttaactgcagacgttatgacatacatacattctatgaattccactattttggaggactggaattttggtctacaacctcccccaggaggcacactagaagatacttataggtttgtaacatcccaggcaattgcttgtcaaaaacatacacctccagcacctaaagaagatccccttaaaaaatacactttttgggaagtaaatttaaaggaaaagttttctgcagacctagatcagtttcctttaggacgcaaatttttactacaagcaggattgaaggccaaaccaaaatttacattaggaaaacgaaaagctacacccaccacctcatctacctctacaactgctaaacgcaaaaaacgtaagctgtaagtattgtatgtatgttgaattagtgttgtttgttgtgtatatgtttgtatgtgcttgtatgtgcttgtaaatattaagttgtatgtgtgtttgtatgtatggtataataaacacgtgtgtatgtgtttttaaatgcttgtgtaactattgtgtcatgcaccataaataaacttattgtttcaacacctactaattgtgttgtggttattcattgtatataaactatatttgctacatcctgtttttgttttatatatactatattttgtagcgccagcggccattttgtagcttcaaccgaattcggttgcatgctttttggcacaaaatgtgtttttttaaatagttctatgtcagcaactatggtttaaacttgtacgtttcctgcttgccatgcgtgccaaatccctgttttcctgacctgcactgcttgccaaccattccattgttttttacactgcactatgtgcaactactgaatcactatgtacattgtgtcatataaaataaatcactatgcgccaacgccttacataccgctgttaggcacatatttttggcttgttttaactaacctaattgcatatttggcataaggtttaaacttctaaggccaactaaatgtcaccctagttcatacatcaactgtgtaaaggttagtcatacattgttcatttgtaaaactgcacatgggtgtgtgcaaaccgttttgggttacacatttacaagcaacttatataataatactaaactacaataattcatgtataaaactaagggcgtaaccgaaatcggttgaaccgaaaccggttagtataaaagcagacattttatgcaccaaaagagaactgcaatgtttcaggacccacaggagcgacccagaaagttaccacagttatgcacagagctgcaaacaactatacatgatataatattagaatgtgtgtactgcaagcaacagttactgcgacgtgaggtatatgactttgcttttcgggatttatgcatagtatatagagatgggaatccatatgctgtatgtgataaatgtttaaagttttattctaaaattagtgagtatagacattattgttatagtttgtatggaacaacattagaacagcaatacaacaaaccgttgtgtgatttgttaattaggtgtattaactgtcaaaagccactgtgtcctgaagaaaagcaaagacatctggacaaaaagcaaagattccataatataaggggtcggtggaccggtcgatgtatgtcttgttgcagatcatcaagaacacgtagagaaacccagctgtaatcatgcatggagatacacctacattgcatgaatatatgttagatttgcaaccagagacaactgatctctactgttatgagcaattaaatgacagctcagaggaggaggatgaaatagatggtccagctggacaagcagaaccggacagagcccattacaatattgtaaccttttgttgcaagtgtgactctacgcttcggttgtgcgtacaaagcacacacgtagacattcgtactttggaagacctgttaatgggcacactaggaattgtgtgccccatctgttctcagaaaccataatctacc

SEQ ID NO: 34 - DNA, 7906 bp, Homo sapiens
  source 1..7906: mol_type = genomic DNA; note = UNCseq1906
atggctgatcctgcaggtaccaatggggaagagggtacgggatgtaatggatggttttatgtagaggctgtagtggaaaaaaaaacaggggatgctatatcagatgacgagaacgaaaatgacagtgatacaggtgaagatttggtagattttatagtaaatgataatgattatttaacacaggcagaaacagagacagcacatgcgttgtttactgcacaggaagcaaaacaacatagagatgcagtacaggttctaaaacgaaagtatttgggtagtccacttagtgatattagtggatgtgtagacaataatattagtcctagattaaaagctatatgtatagaaaaacaaagtagagctgcaaaaaggagattatttgaaagcgaagacagcgggtatggcaatactgaagtggaaactcagcagatgttacaggtagaagggcgccatgagactgaaacaccatgtagtcagtatagtggtggaagtgggggtggttgcagtcagtacagtagtggaagtgggggagagggtgttagtgaaagacacactatatgccaaacaccacttacaaatattttaaatgtactaaaaactagtaatgcaaaggcagcaatgttagcaaaatttaaagagttatacggggtgagtttttcagaattagtaagaccatttaaaagtaataaatcaacgtgttgcgattggtgtattgctgcatttggacttacacccagtatagctgacagtataaaaacactattacaacaatattgtttatatttacacattcaaagtttagcatgttcatggggaatggttgtgttactattagtaagatataaatgtggaaaaaatagagaaacaattgaaaaattgctgtctaaactattatgtgtgtctccaatgtgtatgatgatagagcctccaaaattgcgtagtacagcagcagcattatattggtataaaacaggtatatcaaatattagtgaagtgtatggagacacgccagaatggatacaaagacaaacagtattacaacatagttttaatgattgtacatttgaattatcacagatggtacaatgggcctacgataatgacatagtagacgatagtgaaattgcatataaatatgcacaattggcagacactaatagtaatgcaagtgcctttctaaaaagtaattcacaggcaaaaattgtaaaggattgtgcaacaatgtgtagacattataaacgagcagaaaaaaaacaaatgagtatgagtcaatggataaaatatagatgtgatagggtagatgatggaggtgattggaagcaaattgttatgtttttaaggtatcaaggtgtagagtttatgtcatttttaactgcattaaaaagatttttgcaaggcatacctaaaaaaaattgcatattactatatggtgcagctaacacaggtaaatcattatttggtatgagtttaatgaaatttctgcaagggtctgtaatatgttttgtaaattctaaaagccatttttggttacaaccattagcagatgccaaaataggtatgttagatgatgctacagtgccctgttggaactacatagatgacaatttaagaaatgcattggatggaaatttagtttctatggatgtaaagcatagaccattggtacaactaaaatgccctccattattaattacatctaacattaatgctggtacagattctaggtggccttatttacataatagattggtggtgtttacatttcctaatgagtttccatttgacgaaaacggaaatccagtgtatgagcttaatgataagaactggaaatcctttttctcaaggacgtggtccagattaagtttgcacgaggacgaggacaaggaaaacgatggagactctttgccaacgtttaaatgtgtgtcaggacaaaatactaacacattatgaaaatgatagtacagacctacgtgaccatatagactattggaaacacatgcgcctagaatgtgctatttattacaaggccagagaaatgggatttaaacatattaaccaccaggtggtgccaacactggctgtatcaaagaataaagcattacaagcaattgaactgcaactaacgttagaaacaatatataactcacaatatagtaatgaaaagtggacattacaagacgttagccttgaagtgtatttaactgcaccaacaggatgtataaaaaaacatggatatacagtggaagtgcagtttgatggagacatatgcaatacaatgcattatacaaactggacacatatatatatttgtgaagaagcatcagtaactgtggtagagggtcaagttgactattatggtttatattatgttcatgaaggaatacgaacatattttgtgcagtttaaagatgatgcagaaaaatatagtaaaaataaagtatgggaagttcatgcgggtggtcaggtaatattatgtcctacatctgtgtttagcagcaacgaagtatcctctcctgaaattattaggcagcacttggccaaccaccccgccgcgacccataccaaagccgtcgccttgggcaccgaagaaacacagacgactatccagcgaccaagattagagccagacaccggaaacccctgccacaccactaagttgttgcacagagactcagtggacagtgctccaatcctcactgcatttaacagctcacacaaaggacggattaactgtaatagtaacactacacccatagtacatttaaaaggtgatgctaatactttaaaatgtttaagatatagatttaaaaagcattgtacattgtatactgcagtgtcgtctacatggcattggacaggacataatgtaaaacataaaagtgcaattgttacacttacatatgatagtgaatggcaacgtgaccaatttttgtctcaagttaaaataccaaaaactattacagtgtctactggatttatgtctatatgacaaatcttgatactgcatccacaacattactggcgtgctttttgctttgcttttgtgtgcttttgtgtgtctgcctattaatacgtccgctgcttttgtctgtgtctacatacacatcattaataatattggtattactattgtggataacagcagcctatgcgtttaggtgttttattgtatatattatatttgtttatataccattatttttaatacatacacatgcacgctttttaattacataatgtatatgtacataatgtaattgttacatataattgttgtataccataacttactattttttcttttttattttcatatataatttttttttttgtttgtttgtttgttttttaataaactgttatcacttaacaatgcgacacaaacgttctgcaaaacgcacaaaacgtgcatcggctacccaactttataaaacatgcaaacaggcaggtacatgtccacctgacattatacctaaggttgaaggcaaaactattgctgatcaaatattacaatatggaagtatgggtgtattttttggtgggttaggaattggaacagggtcgggtacaggcggacgcactgggtatattccattgggaacaaggcctcccacagctacagatacacttgctcctgtaagaccccctttaacagtagatcctgtgggcccttctgatccttctatagtttctttagtggaagaaactagttttattgatgctggtgcaccaacatctgtaccttccattcccccagatgtatcaggatttagtattactacttcaactgataccacacctgctatattagatattaataatactgttactactgttactacacataataatcccactttcactgacccatctgtattgcagcctccaacacctgcagaaactggagggcattttacactttcatcatccactattagtacacataattatgaagaaattcctatggatacatttattgttagcacaaaccctaacacagtaactagtagcacacccataccagggtctcgcccagtggcacgcctaggattatatagtcgcacaacacaacaggttaaagttgtagaccctgcttttgtaaccactcccactaaacttattacatatgataatcctgcatatgaaggtatagatgtggataatacattatatttttctagtaatgataatagtattaatatagctccagatcctgactttttggatatagttgctttacataggccagcattaacctctaggcgtactggcattaggtacagtagaattggtaataaacaaacactacgtactcgtagtggaaaatctataggtgctaaggtacattattattatgatttcagtactattgatcctgcagaagaaatagaattacaaactataacaccttctacatatactaccacttcacatgcagcctcacctacttctattaataatggattatatgatatttatgcagatgactttattacagatacttctacaaccccggtaccatctgtaccctctacatctttatcaggttatattcctgcaaatacaacaattccttttggtggtgcatacaatattcctttagtatcaggtcctgatatacccattaatataactgaccaagctccttcattaattcctatagttccagggtctccacaatatacaattattgctgatgcaggtgacttttatttacatcctagttattacatgttacgaaaacgacgtaaacgtttaccatattttttttcagatgtctctttggctgcctagtgaggccactgtctacttgcctcctgtcccagtatctaaggttgtaagcacggatgaatatgttgcacgcacaaacatatattatcatgcaggaacatccagactacttgcagttggacatccctattttcctattaaaaaacctaacaataacaaaatattagttcctaaagtatcaggattacaatacagggtatttagaatacatttacctgaccccaataagtttggttttcctgacacctcattttataatccagatacacagcggctggtttgggcctgtgtaggtgttgaggtaggtcgtggtcagccattaggtgtgggcattagtggccatcctttattaaataaattggatgacactgaaaatgctagtgcttatgcagcaaatgcaggtgtggataatagagaatgtatatctatggattacaaacaaacacaattgtgtttaattggttgcaaaccacctataggggaacactggggcaaaggatccccatgtaccaatgttgcagtaaatccaggtgattgtccaccattagagttaataaacacagttattcaggatggtgatatggttgatactggctttggtgctatggactttactacattacaggctaacaaaagtgaagttccactggatatttgtacatctatttgcaaatatccagattatattaaaatggtgtcagaaccatatggcgacagcttatttttttatttacgaagggaacaaatgtttgttagacatttatttaatagggctggtactgttggtgaaaatgtaccagacgatttatacattaaaggctctgggtctactgcaaatttagccagttcaaattattttcctacacctagtggttctatggttacctctgatgcccaaatattcaataaaccttattggttacaacgagcacagggccacaataatggcatttgttggggtaaccaactatttgttactgttgttgatactacacgcagtacaaatatgtcattatgtgctgccatatctacttcagaaactacatataaaaatactaactttaaggagtacctacgacatggggaggaatatgatttacagtttatttttcaactgtgcaaaataaccttaactgcagacgttatgacatacatacattctatgaattccactattttggaggactggaattttggtctacaacctcccccaggaggcacactagaagatacttataggtttgtaacatcccaggcaattgcttgtcaaaaacatacacctccagcacctaaagaagatccccttaaaaaatacactttttgggaagtaaatttaaaggaaaagttttctgcagacctagatcagtttcctttaggacgcaaatttttactacaagcaggattgaaggccaaaccaaaatttacattaggaaaacgaaaagctacacccaccacctcatctacctctacaactgctaaacgcaaaaaacgtaagctgtaagtattgtatgtatgttgaattagtgttgtttgttgtgtatatgtttgtatgtgcttgtatgtgcttgtaaatattaagttgtatgtgtgtttgtatgtatggtataataaacacgtgtgtatgtgtttttaaatgcttgtgtaactattgtgtcatgcaacataaataaacttattgtttcaacacctactaattgtgttgtggttattcattgtatataaactatatttgctacatcctgtttttgttttatatatactatattttgtagcgccagcggccattttgtagcttcaaccgaattcggttgcatgctttttggcacaaaatgtgtttttttaaatagttctatgtcagcaactatggtttaaacttgtacgtttcctgcttgccatgcgtgccaaatccctgttttcctgacctgcactgcttgccaaccattccattgttttttacactgcactatgtgcaactactgaatcactatgtacattgtgtcatataaaataaatcactatgcgccaacgccttacataccgctgttaggcacatatttttggcttgttttaactaacctaattgcatatttggcataaggtttaaacttctaaggccaactaaatgtcaccctagttcatacatgaactgtgtaaaggttagtcatacattgttcatttgtaaaactgcacatgggtgtgtgcaaaccgttttgggttacacatttacaagcaacttatataataatactaaattacaataattcatgtataaaactaagggcgtaaccgaaatcggttgaaccgaaaccggttagtataaaagcagacattttatgcaccaaaagagaactgcaatgtttcaggacccacaggagcgacccagaaagttaccacagttatgcacagagctgcaaacaactatacatgatataatattagaatgtgtgtactgcaagcaacagttactgcgacgtgaggtatatgactttgcttttcgggatttatgcatagtatatagagatgggaatccatatgctgtatgtgataaatgtttaaagttttattctaaaattagtgagtatagacattattgttatagtttgtatggaacaacattagaacagcaatacaacaaaccgttgtgtgatttgttaattaggtgtattaactgtcaaaagccactgtgtcctgaagaaaagcaaagacatctggacaaaaagcaaagattccataatataaggggtcggtggaccggtcgatgtatgtcttgttgcagatcatcaagaacacgtagagaaacccagctgtaatcatgcatggagatacacctacattgcatgaatatatgttagatttgcaaccagagacaactgatctctactgttatgagcaattaaatgacagctcagaggaggaggatgaaatagatggtccagctggacaagcagaaccggacagagcccattacaatattgtaaccttttgttgcaagtgtgactctacgcttcggttgtgcgtacaaagcacacacgtagacattcgtactttggaagacctgttaatgggcacactaggaattgtgtgccccatctgttctcagaaaccataatctacc

SEQ ID NO: 35 - DNA, 7906 bp, Homo sapiens
  source 1..7906: mol_type = genomic DNA; note = UNCseq1918
atggctgatcctgcaggtaccaatggggaagagggtacgggatgtaatggatggttttatgtagaggctgtagtggaaaaaaaaacaggggatgctatatcagatgacgagaacgaaaatgacagtgatacaggtgaagatttggtagattttatagtaaatgataatgattatttaacacaggcagacacagagacagcacatgcgttgtttactgcacaggaagcaaaacaacatagagatgcagtacaggttttaaaacgaaagtatttgggtagtccacttagtgatattagtggatgtgtagacaataatattagtcctagattaaaagctatatgtatagaaaaacaaagtagagctgcaaaaaggagattatttgaaagcgaagacagcgggtatggcaatactgaagtggaaactcagcagatgttacaggtagaagggcgccatgagactgaaacaccatgtagtcagtatagtggtggaagtgggggtggttgcagtcagtacagtagtggaagtgggggagagggtgttagtgaaagacacactatatgccaaacaccacttacaaatattttaaatgtactaaaaactagtaatgcaaaggcagcaatgttagcaaaatttaaagagttatacggggtgagtttttcagaattagtaagaccatttaaaagtaataaatcaacgtgttgcgattggtgtattgctgcatttggacttacacccagtatagctgacagtataaaaacactattacaacaatattgtttatatttacacattcaaagtttagcatgttcatggggaatggttgtgttactattagtaagatataaatgtggaaaaaatagagaaacaattgaaaaattgctgtctaaactattatgtgtgtctccaatgtgtatgatgatagagcctccaaaattgcgtagtacagcagcagcattatattggtataaaacaggtatatcaaatattagtgaagtgtatggagacacgccagaatggatacaaagacaaacagtattacaacatagttttaatgattgtacatttgaattatcacagatggtacaatgggcctacgataatgacatagtagacgatagtgaaattgcatataaatatgcacaattggcagacactaatagtaatgcaagtgcctttctaaaaagtaattcacaggcaaaaattgtaaaggattgtgcaacaatgtgtagacattataaacgagcagaaaaaaaacaaatgagtatgagtcaatggataaaatatagatgtgatagggtagatgatggaggtgattggaagcaaattgttatgtttttaaggtatcaaggtgtagagtttatgtcatttttaactgcattaaaaagatttttgcaaggcatacctaaaaaaaattgcatattactatatggtgcagctaacacaggtaaatcattatttggtatgagtttaatgaaatttctgcaagggtctgtaatatgttttgtaaattctaaaagccatttttggttacaaccattagcagatgccaaaataggtatgttagatgatgctacagtgccctgttggaactacatagatgacaatttaagaaatgcattggatggaaatttagtttctatggatgtaaagcatagaccattggtacaactaaaatgccctccattattaattacatctaacattaatgctggtacagattctaggtggccttatttacataatagattggtggtgtttacatttcctaatgagtttccatttgacgaaaacggaaatccagtgtatgagcttaatgataagaactggaaatcctttttctcaaggacgtggtccagattaagtttgcacgaggacgaggacaaggaaaacgatggagactctttgccaacgtttaaatgtgtgtcaggacaaaatactaacacattatgaaaatgatagtacagacctacgtgaccatatagactattggaaacacatgcgcctagaatgtgctatttattacaaggccagagaaatgggatttaaacatattaaccaccaggtggtgccaacactggctgtatcaaagaataaagcattacaagcaattgaactgcaactaacgttagaaacaatatataactcacaatatagtaatgaaaagtggacattacaagacgttagccttgaagtgtatttaactgcaccaacaggatgtataaaaaaacatggatatacagtggaagtgcagtttgatggagacatatgcaatacaatgcattatacaaactggacacatatatatatttgtgaagaagcatcagtaactgtggtagagggtcaagttgactattatggtttatattatgttcatgaaggaatacgaacatattttgtgcagtttaaagatgatgcagaaaaatatagtaaaaataaagtatgggaagttcatgcgggtggtcaggtaatattatgtcctacatctgtgtttagcagcaacgaagtatcctctcctgaaattattaggcagcacttggccaaccactccgccgcgacccataccaaagccgtcgccttgggcaccgaagaaacacagacgactatccagcgaccaagatcagagccagacaccggaaacccctgccacaccactaagttgttgcacagagactcagtggacagtgctccaatcctcactgcatttaacagctcacacaaaggacggattaactgtaatagtaacactacacccatagtacatttaaaaggtgatgctaatactttaaaatgtttaagatatagatttaaaaagcattgtacattgtatactgcagtgtcgtctacatggcattggacaggacataatgtaaaacataaaagtgcaattgttacacttacatatgatagtgaatggcaacgtgaccaatttttgtctcaagttaaaataccaaaaactattacagtgtctactggatttatgtctatatgacaaatcttgatactgcatccacaacattactggcgtgctttttgctttgcttttgtgtgcttttgtgtgtctgcctattaatacgtccgctgcttttgtctgtgtctacatacacatcattaatactattggtattactattgtggataacagcagcctctgcgtttaggtgttttattgtatatattgtatttgtttatataccattatttttaatacatacacatgcacgctttttaattacataatgtatatgtacataatgtaattgttacatataattgttgtataccataacttactatttttttttttttattttcatatataatttttttttttgtttgtttgtttgttttttaataaactgttatcacttaacaatgcgacacaaacgttctgcaaaacgcacaaaacgtgcatcggctacccaactttataaaacatgcaaacaggcaggtacatgtccacctgacattatacctaaggttgaaggcaaaactattgctgatcaaatattacaatatggaagtatgggtgtattttttggtgggttaggaattggaacagggtcgggtacaggcggacgcactgggtatattccattgggaacaaggcctcccacagctacagatacacttgctcctgtaagaccccctttaacagtagatcctgtgggcccttctgatccttctatagtttctttagtggaagaaactagttttattgatgctggtgcaccaacatctgtaccttccattcccccagatgtatcaggatttagtattactacttcaactgataccacacctgctatattagatattaataatactgttactactgttactacacataataatcccactttcactgacccatctgtattgcagcctccaacacctgcagaaactggagggcattttacactttcatcatccactattagtacacataattatgaagaaattcctatggatacatttattgttagcacaaaccctaacacagtaactagtagcacacccataccagggtctcgcccagtggcacgcctaggattatatagtcgcacaacacaacaagttaaagttgtagaccctgcttttgtaaccactcccactaaacttattacatatgataatcctgcatatgaaggtatagatgtggataatacattatatttttctagtaatgataatagtattaatatagctccagatcctgactttttggatatagttgctttacataggccagcattaacctctaggcgtactggcattaggtacagtagaattggtaataaacaaacactacgtactcgtagtggaaaatctataggtgctaaggtacattattattatgattttagtactattgatcctgcagaagaaatagaattacaaactataacaccttctacatatactaccacttcacatgcagcctcacctacttctattaataatggattatatgatatttatgcagatgactttattacagatacttctacaaccccggtaccatctgtaccctctacatctttatcaggttatattcctgcaaatacaacaattccttttggtggtgcatacaatattcctttagtatcaggtcctgatatacccattaatataactgaccaagctccttcattaattcctatagttccagggtctccacaatatacaattattgctgatgcaggtgacttttatttacatcctagttattacatgttacgaaaacgacgtaaacgtttaccatattttttttcagatgtctctttggctgcctagtgaggccactgtctacttgcctcctgtcccagtatctaaggttgtaagcacggatgaatatgttgcacgcacaaacatatattatcatgcaggaacatccagactacttgcagttggacatccctattttcctattaaaaaacctaacaataacaaaatattagttcctaaagtatcaggattacaatacagggtatttagaatacatttacctgaccccaataagtttggttttcctgacacctcattttataatccagatacacagcggctggtttgggcctgtgtaggtgttgaggtaggtcgtggtcagccattaggtgtgggcattagtggccatcctttattaaataaattggatgacacagaaaatgctagtgcttatgcagcaaatgcaggtgtggataatagagaatgtatatctatggattacaaacaaacacaattgtgtttaattggttgcaaaccacctataggggaacactggggcaaaggatccccatgtaccaatgttgcagtaaatccaggtgattgtccaccattagagttaataaacacagttattcaggatggtgatatggttgatactggctttggtgctatggactttactacattacaggctaacaaaagtgaagttccactggatatttgtacatctatttgcaaatatccagattatattaaaatggtgtcagaaccatatggcgacagcttatttttttatttacgaagggaacaaatgtttgttagacatttatttaatagggctggtgctgttggtgaaaatgtaccagacgatttatacattaaaggctctgggtctactgcaaatttagccagttcaaattattttcctacacctagtggttctatggttacctctgatgcccaaatattcaataaaccttattggttacaacgtgcacagggccacaataatggcatttgttggggtaaccaactatttgttactgttgttgatactacacgcagtacaaatatgtcattatgtgctgccatatctacttcagaaactacatataaaaatactaactttaaggagtacctacgacatggggaggaatatgatttacagtttatttttcaactgtgcaaaataaccttaactgcagacgttatgacatacatacattctatgaattccactattttggaggactggaattttggtctacaacctcccccaggaggcacactagaagatacttataggtttgtaacatcccaggcaattgcttgtcaaaaacatacacctccagcacctaaagaagatccccttaaaaaatacactttttgggaagtcaatttaaaggaaaagttttctgcagacctagatcagtttcctttaggacgcaaatttttactacaagcaggattgaaggccaaaccaaaatttacattaggaaaacgaaaagctacacccaccacctcatctacctctacaactgctaaacgcaaaaaacgtaagctgtaagtattgtatgtatgttgaattagtgttgtttgttgtttatatgtttgtatgtgcttgtatgtgcttgtaaatattaagttgtatgtgtgtttgtatgtatggtataataaacacgtgtgtatgtgtttttaaatgcttgtgtaactattgtgtcatgcaacataaataaacttattgtttcaacacctactaattgtgttgtggttattcattgtatataaactatatttgctacatcctgtttttgttttatatatactatattttgtagcgccagcggccattttgtagctccaaccgaattcggttgcatgctttttggcacaaaatgtgtttttttaaatagttctatgtcagcaactatagtttaaacttgtacgtttcctgcttgccatgcgtgccaaatccctgttttcctgacctgcactgcttgccaaccattccattgttttttacactgcactatgtgcaactactgaatcactatgtacattgtgtcatataaaataaatcactatgcgccaacgccttacataccgctgttaggcacatatttttggcttgttttaactaacctaattgcatatttggcataaggtttaaacttctaaggccaactaaatgtcaccctagttcatacatgaactgtgtaaaggttagtcatacattgttcatttgtaaaactgcacatgggtgtgtgcaaaccgttttgggttacacatttacaagcaacttatataataatactaaactacaataattcatgtataaaactaagggcgtaaccgaaatcggttgaaccgaaaccggttagtataaaagcagacattttatgcaccaaaagagaactgcaatgtttcaggacccacaggagcgacccagaaagttaccacagttatgcacagagctgcaaacaactatacatgatataatattagaatgtgtgtactgcaagcaacagttactgcgacgtgaggtatatgactttgcttttcgggatttatgcatagtatatagagatgggaatccatatgctgtatgtgataaatgtttaaagttttattgtaaaattagtgagtatagacattattgttatagtgtgtatggaacaacattagaacagcaatacaacaaaccgttgtgtgatttgttaattaggtgtattaactgtcaaaagccactgtgtcctgaagaaaagcaaagacatctggacaaaaagcaaagattccataatataaggggtcggtggaccggtcgatgtatgtcttgttgcagatcatcaagaacacgtagagaaacccagctgtaatcatgcatggagatacacctacattgcatgaatatatgttagatttgcaaccagagacaactgatctctactgttatgagcaattaaatgacagctcagaggaggaggatgaaatagatggtccagctggacaagcagaaccggacagagcccattacaatattgtaaccttttgttgcaagtgtgactctacgcttcggttgtgcgtacaaagcacacacgtagacattcgtactttggaagacctgttaatgggcacactaggaattgtgtgccccatctgttctcagaaaccataatctacc

SEQ ID NO: 36 - DNA, 7906 bp, Homo sapiens
  source 1..7906: mol_type = genomic DNA; note = UNCseq1924
atggctgatcctgcaggtaccaatggggaagagggtacgggatgtaatggatggttttatgtagaggctgtagtggaaaaaaaaacaggggatgctatatcagatgacgagaacgaaaatgacagtgatacaggtgaagatttggtagattttatagtaaatgataatgattatttaacacaggcagaaacagagacagcacatgcgttgtttactgcacaggaagcaaaacaacatagagatgcagtacaggttctaaaacgaaagtatttgggtagtccacttagtgatattagtggatgtgtagacaataatattagtcctagattaaaagctatatgtatagaaaaacaaagtagagctgcaaaaaggagattatttgaaagcgaagacagcgggtatggcaatactgaagtggaaactcagcagatgttacaggtagaagggcgccatgagactgaaacaccatgtagtcagtatagtggtggaagtgggggtggttgcagtcagtacagtagtggaagtgggggagagggtgttagtgaaagacacactatatgccaaacaccacttacaaatattttaaatgtactaaaaactagtaatgcaaaggcagcaatgttagcaaaatttaaagagttatacggggtgagttttacagaattagtaagaccatttaaaagtaataaatcaacgtgttgcgattggtgtattgctgcatttggacttacacccagtatagctgacagtataaaaacactattacaacaatattgtttatatttacacattcaaagtttagcatgttcatggggaatggttgtgttactattagtaagatataaatgtggaaaaaatagagaaacaattgaaaaattgctgtctaaactattatgtgtgtctccaatgtgtatgatgatagagcctccaaaattgcgtagtacagcagcagcattatattggtataaaacaggtatatcaaatattagtgaagtgtatggagacacgccagaatggatacaaagacaaacagtattacaacatagttttaatgattgtacatttgaattatcacagatggtacaatgggcctacgataatgacatagtagacgatagtgaaattgcatataaatatgcacaattggcagacactaatagtaatgcaagtgcctttctaaaaagtaattcacaggcaaaaattgtaaaggattgtgcaacaatgtgtagacattataaacgagcagaaaaaaaacaaatgagtatgagtcaatggataaaatatagatgtgatagggtagatgatggaggggattggaagcaaattgttatgtttttaaggtatcaaggtgtagagtttatgtcatttttaactgcattaaaaagatttttgcaaggcatacctaaaaaaaattgcatattactatatggtgcagctaacacaggtaaatcattatttggtatgagtttaatgaaatttctgcaagggtctgtaatatgttttgtaaattctaaaagccatttttggttacaaccattagcagatgccaaaataggtatgttagatgatgctacagtgccctgttggaactatatagatgacaatttaagaaatgcattggatggaaatttagtttctatggatgtaaagcatagaccattggtacaactaaaatgccctccattattaattacatctaacattaatgctggtacagattctaggtggccttatttacataatagattggtggtgtttacatttcctaatgagtttccatttgacgaaaacggaaatccagtgtatgagcttaatgataagaactggaaatcctttttctcaaggacgtggtccagattaagtttgcacgaggacgaggacaaggaaaacgatggagactctttgccaacgtttaaatgtgtgtcaggacaaaatactaacacattatgaaaatgatagtacagacctacgtgaccatatagactattggaaacacatgcgcctagaatgtgctatttattacaaggccagagaaatgggatttaaacatattaaccaccaggtggtgccaacgctggctgtatcaaagaataaagcattacaagcaattgaactgcaactaacgttagaaacaatatataactcacaatatagtaatgaaaagtggacattacaagacgttagccttgaagtgtatttaactgcaccaacaggatgtataaaaaaacatggatatacagtggaagtgcagtttgatggagacatatgcaatacaatgcattatacaaactggacacatatatatatttgtgaagaagcatcagtaactgtggtagagggtcaagttgactattatggtttatattatgttcatgaaggaatacgaacatattttgtgcagtttaaagatgatgcagaaaaatatagtaaaaataaagtatgggaagttcatgcgggtggtcaggtaatattatgtcctacatctgtgtttagcagcaacgaagtatcctctcctgaaactattaggcagcacttggccaaccactccgccgcgacccataccaaagccgtcgccttgggcaccgaagaaacacagacgactatccagcgaccaagatcagagccagacaccggaaacccctgccacaccactaagttgttgcacagagactcagtggacagtgctccaatcctcactgcatttaacagctcacacaaaggacggattaactgtaatagtaacactacacccatagtacatttaaaaggtgatgctaatactttaaaatgtttaagatatagatttaaaaagcattgtaaattgtatactgcagtgtcgtctacatggcattggacaggacataatgtaaaacataaaagtgcaattgttacacttacatatgatagtgaatggcaacgtgaccaatttttgtctcaagttaaaataccaaaaactattacagtgtctactggatttatgtctatatgacaaattttgatactgcatccacaacattactggcgtgctttttgctttgcttttgtgtgcttttgtgtgtctgcctattaatacgtccgctgcttttgtctgtgtctacatacacatcattaatactattggtattactattgtggataacagcagcctctgcgtttaggtgttttattgtatatattgtatttgtttatataccattatttttaatacatacacatgcacgctttttaattacataatgtatatgtacataatgtaattgttacatataattgttgtataccataacttactattttttcttttttatttttatatataatttttttttttgtttgtttgtttgttttttaataaactgttatcacttaacaatgcgacacaaacgttctgcaaaacgcacaaaacgtgcatcggctacccaactttataaaacatgcaaacaggcaggtacatgtccacctgacattatacctaaggttgaaggcaaaactattgctgatcaaatattacaatatggaagtatgggtgtattttttggtgggttaggaattggaacagggtcgggtacaggcggacgcactgggtatattccattgggaacaaggcctcccacagctacagatacacttgctcctgtaagaccccctttaacagtagatcctgtgggcccttctgatccttctatagtttctttagtggaagaaactagttttattgatgctggtgcaccaacatctgtaccttccattcccccagatgtatcaggatttagtattactacttcaactgataccacacctgctatattagatattaataatactgttactactgttactacacataataatcccactttcactgacccatctgtattgcagcctccaacacctgcagaaactggagggcattttacactttcatcatccactattagtacacataattatgaagaaattcctatggatacatttattgttagcacaaaccctaacacagtaactagtagcacacccataccagggtctcgcccagtggcacgcctaggattatatagtcgcacaacacaacaagttaaagttgtagaccctgcttttgtaaccactcccactaaacttattacatatgataatcctgcatatgaaggtatagatgtggataatacattatattttcctagtaatgataatagtattaatatagctccagatcctgactttttggatatagttgctttacataggccagcattaacctctaggcgtactggcattaggtacagtagaattggtaataaacaaacactacgtactcgtagtggaaaatctataggtgctaaggtacattattattatgatttgagtactattgatcctgcagaagaaatagaattacaaactataacaccttctacatatactaccacttcacatgcagcctcacctacttctattaataatggattatatgatatttatgcagatgactttattacagatacttctacaaccccggtaccatctgtaccctctacatctttatcaggttatattcctgcaaatacaacaattccttttggtggtgcatacaatattcctttagtatcaggtcctgatatacccatgaatataactgaccaagctccttcattaattcctatagttccagggtctccacaatatacaattattgctgatgcaggtgacttttatttacatcctagttattacatgttacgaaaacgacgtaaacgtttaccatattttttttcagatgtctctttggctgcctagtgaggccactgtctacttgcctcctgtcccagtatctaaggttgtaagcacggatgaatatgttgcacgcacaaacatatattatcatgcaggaacatccagactacttgcagttggacatccctattttcctattaaaaaacctaacaataacaaaatattagttcctaaagtatcaggattacaatacagggtatttagaatacatttacctgaccccaataagtttggttttcctgacacctcattttataatccagatacacagcggctggtttgggcctgtgtaggtgttgaggtaggtcgtggtcagccattaggtgtgggcattagtggccatcctttattaaataaattggatgacacagaaaatgctagtgcttatgcagcaaatgcaggtgtggataatagagaatgtatatctatggattacaaacaaacacaattgtgtttaattggttgcaaaccacctataggggaacactggggcaaaggatccccatgtaccaatgttgcagtaaatccaggtgattgtccaccattagagttaataaacacagttattcaggatggtgatatggttgatactggctttggtgctatggactttactacattacaggctaacaaaagtgaagttccactggatatttgtacatctatttgcaaatatccagattatattaaaatggtgtcagaaccatatggcgacagcttatttttttatttacgaagggaacaaatgtttgttagacatttatttaatagggctggtgctgttggtgaaaatgtaccagacgatttatacattaaaggctctgggtctactgcaaatttagccagttcaaattattttcctacacctagtggttctatggttacctctgatgcccaaatattcaataaaccttattggttacaacgagcacagggccacaataatggcatttgttggggtaaccaactatttgttactgttgttgatactacacgcagtacaaatatgtcattatgtgctgccatatctacttcagaaactacatataaaaatactaactttaaggagtacctacgacatggggaggaatatgatttacagtttatttttcaactgtgcaaaataaccttaactgcagacgttatgacatacatacattctatgaattccactattttggaggactggaattttggtctacaacctcccccaggaggcacactagaagatacttataggtttgtaacatcccaggcaattgcttgtcaaaaacatacacctccagcacctaaagaagatccccttaaaaaatacactttttgggaagtaaatttaaaggaaaagttttctgcagacctagatcagtttcctttaggacgcaaatttttactacaagcaggattaaaggccaaaccaaaatttacattaggaaaacgaaaagctacacccaccacctcatctacctctacaactgctaaacgcaaaaaacgtaagctgtaagtattgtatgtatgttgaattagtgttgtttgttgtgtatatgtttgtatgtgcttgtatgtgcttgtaaatattaagttgtatgtgtgtttgtatgtatggtataataaacacgtgtgtatgtgtttttaaatgcttgtgtaactattgtgtcatgcaacataaataaacttattgtttcaacacctactaattgtgttgtggttattcattgtatataaactatatttgctacatcctgtttttgttttatatatactatattttgtagcgccagcggccattttgtagcttcaaccgaattcggttgcatgctttttggcacaaaatgtgtttttttaaatagttctatgtcagcaactatggtttaaacttgtacgtttcctgcttgccatgcgtgccaaatccctgttttcctgacctgcactgcttgccaaccattccattgttttttacactgcactatgtgcaactactgaatcactatgtacattgtgtcatataaaataaatcactatgcgccaacgccttacataccgctgttaggcacatatttttggcttgttttaactaacctaattgcatatttggcataaggtttaaacttctaaggccaactaaatgtcaccctagttcatacatgaactgtgtaaaggttagtcatacattgttcatttgtaaaactgcacatgggtgtgtgcaaaccgttttgggttacacatttacaagcaacttatataataatactaaactacaataattcatgtataaaactaagggcgtaaccgaaatcggttgaaccgaaaccggttagtataaaagcagacattttatgcaccaaaagagaactgcaatgtttcaggacccacaggagcgacccagaaagttaccacagttatgcacagagctgcaaacaactatacatgatataatattagaatgtgtgtactgcaagcaacagttactgcgacgtgaggtatatgactttgcttttcgggatttatgcatagtatatagagatgggaatccatatgctgtatgtgataaatgtttaaagttttattctaaaattagtgagtatagacattattgttatagtttgtatggaacaacattagaacagcaatacaacaaaccgttgtgtgatttgttaattaggtgtattaactgtcaaaagccactgtgtcctgaagaaaagcaaagacatctggacaaaaagcaaagattccataatataaggggtcggtggaccggtcgatgtatgtcttgttgcagatcatcaagaacacgtagagaaacccagctgtaatcatgcatggagatacacctacattgcatgaatatatgttagatttgcaaccagagacaactgatctctactgttatgagcaattaaatgacagctcagaggaggaggatgaaatagatggtccagctggacaagcagaaccggacagagcccattacaatattgtaaccttttgttgcaagtgtgactctacgcttcggttgtgcgtacaaagcacacacgtagacattcgtactttggaagacctgttaatgggcacactaggaattgtgtgccccatctgttctcagaaaccataatctacc

SEQ ID NO: 37 - DNA, 7906 bp, Homo sapiens
  source 1..7906: mol_type = genomic DNA; note = UNCseq1930
atggctgatcctgcaggtaccaatggggaagagggtacgggatgtaatggatggttttatgtagaggctgtagtggaaaaaaaaacaggggatgctatatcagatgacgagaacgaaaatgacagtgatacaggtgaagatttggtagattttatagtaaatgataatgattatttaacacaggcagaaacagagacagcacatgcgttgtttactgcacaggaagcaaaacaacatagagatgcagtacaggttctaaaacgaaagtatttgggtagtccacttagtgatattagtggatgtgtagacaataatattagtcctagattaaaagctatatgtatagaaaaacaaagtagagctgcaaaaaggagattatttgaaagcgaagacagcgggtatggcaatactgaagtggaaactcagcagatgttacaggtagaagggcgccatgagactgaaacaccatgtagtcagtatagtggtggaagtgggggtggttgcagtcagtacagtagtggaagtgggggagagggtgttagtgaaagacacactatatgccaaacaccacttacaaatattttaaatgtactaaaaactagtaatgcaaaggcagcaatgttagcaaaatttaaagagttatacggggtgagtttttcagaattagtaagaccatttaaaagtaataaatcaacgtgttgcgattggtgtattgctgcatttggacttacacccagtatagctgacagtataaaaacactattacaacaatattgtttatatttacacattcaaagtttagcatgttcatggggaatggttgtgttactattagtaagatataaatgtggaaaaaatagagaaacaattgaaaaattgctgtctaaactattatgtgtgtctccaatgtgtatgatgatagagcctccaaaattgcgtagtacagcagcagcattatattggtataaaacaggtatatcaaatattagtgaagtgtatggagacacgccagaatggatacaaagacaaacagtattacaacacagttttaatgattgtacatttgaattatcacagatggtacaatgggcctacgataatgacatagtagacgatagtgaaattgcatataaatatgcacaattggcagacactaatagtaatgcaagtgcctttctaaaaagtaattcacaggcaaaaattgtaaaggattgtgcaacaatgtgtagacattataaacgagcagaaaaaaaacaaatgagtatgagtcaatggataaaatatagatgtgatagggtagatgatggaggtgattggaagcaaattgttatgtttttaaggtatcaaggtgtagagtttatgtcatttttaactgcattaaaaagatttttgcaaggcatacctaaaaaaaattgcatattactatatggtgcagctaacacaggtaaatcattatttggtatgagtttaatgaaatttctgcaagggtctgtaatatgttttgtaaattctaaaagccatttttggttacaaccattagcagatgccaaaataggtatgttagatgatgctacagtgccctgttggaactacatagatgacaatttaagaaatgcattggatggaaatttagtttctatggatgtaaagcatagaccattggtacaactaaaatgccctccattattaattacatctaacattaatgctggtacagattctaggtggccttatttacataatagattggtggtgtttacatttcctaatgagtttccatttgacgaaaacggaaatccagtgtatgagcttaatgataagaactggaaatcctttttctcaaggacgtggtccagattaagtttgcacgaggacgaggacaaggaaaacgatggagactctttgccaacgtttaaatgtgtgtcaggacaaaatactaacacattatgaaaatgatagtacagacctacgtgaccatatagactattggaaacacatgcgcctagaatgtgctatttattacaaggccagagaaatgggatttaaacatattaaccaccaggtggtgccaacactggctgtatcaaagaataaagcattacaagcaattgaactgcaactaacgttagaaacaatatataactcacaatatagtaatgaaaagtggacattacaagacgttagccttgaagtgtatttaactgcaccaacaggatgtataaaaaaacatggatatacagtggaagtgcagtttgatggagacatatgcaatacaatgcattatacaaactggacacatatatatatttgtgaagaagcatcagtaactgtggtagagggtcaagttgactattatggtttatattatgttcatgaaggaatacgaacatattttgtgcagtttaaagatgatgcagaaaaatatagtaaaaataaagtatgggaagttcatgcgggtggtcaggtaatattatgtcctacatctgtgtttagcagcaacgaagtatcctctcctgaaattattaggcagcacttggccaaccaccccgccgcgacccataccaaagccgtcgccttgggcaccgaagaaacacagacgactatccagcgaccaagatcagagccagacaccggaaacccctgccacaccactaagttgttgcacagagactcagtggacagtgctccaatcctcactgcatttaacagctcacacaaaggacggattaactgtaatagtaacactacacccatagtacatttaaaaggtgatgctaatactttaaaatgtttaagatatagatttaaaaagcattgtacattgtatactgcagtgtcgtctacatggcattggacaggacataatgtaaaacataaaagtgcaattgttacacttacatatgatagtgaatggcaacgtgaccaatttttgtctcaagttaaaataccaaaaactattacagtgtctactggatttatgtctatatgacaaatcttgatactgcatccacaacattactggcgtgctttttgctttgcttttgtgtgcttttgtgtgtctgcctattaatacgtccgctgcttttgtctgtgtctacatacacatcattaataatattggtattactattgtggataacagcagcctctgcgtttaggtgttttattgtatatattatatttgtttatataccattatttttaatacatacacatgcacgctttttaattacataatgtatatgtacataatgtaattgttacatataattgttgtataccataacttactattttttcttttttattttcatatataatttttttttttgtttgtttgtttgttttttaataaactgttatcacttaacaatgcgacacaaacgttctgcaaaacgcacaaaacgtgcatcggctacccaactttataaaacatgcaaacaggcaggtacatgtccacctgacattatacctaaggttgaaggcaaaactattgctgatcaaatattacaatatggaagtatgggtgtattttttggtgggttaggaattggaacagggtcgggtacaggcggacgcactgggtatattccattgggaacaaggcctcccacagctacagatacacttgctcctgtaagaccccctttaacagtagatcctgtgggcccttctgatccttctatagtttctttagtggaagaaactagttttattgatgctggtgcaccaacatctgtaccttccattcccccagatgtatcaggatttagtattactacttcaactgataccacacctgctatattagatattaataatactgttactactgttactacacataataatcccactttcactgacccatctgtattgcagcctccaacacctgcagaaactggagggcattttacactttcatcatccactattagtacacataattatgaagaaattcctatggatacatttattgttagcacaaaccctaacacagtaactagtagcacacccataccagggtctcgcccagtggcacgcctaggattatatagtcgcacaacacaacaagttaaagttgtagaccctgcttttgtaaccactcccactaaacttattacatatgataatcctgcatatgaaggtatagatgtggataatacattatatttttctagtaatgataatagtattaatatagctccagatcctgactttttggatatagttgctttacataggccagcattaacctctaggcgtactggcattaggtacagtagaattggtaataaacaaacactacgtactcgtagtggaaaatctataggtgctaaggtacattattattatgatttcagtactattgatcctgcagaagaaatagaattacaaactataacaccttctacatatactaccacttcacatgcagcctcacctacttctattaataatggattatatgatatttatgcagatgactttattacagatacttctacaaccccggtaccatctgtaccctctacatctttatcaggttatattcctgcaaatacaacaattccttttggtggtgcatacaatattcctttagtatcaggtcctgatatacccattaatataactgaccaagctccttcattaattcctatagttccagggtctccacaatatacaattattgctgatgcaggtgacttttatttacatcctagttattacatgttacgaaaacgacgtaaacgtttaccatattttttttcagatgtctctttggctgcctagtgaggccactgtctacttgcctcctgtcccagtatctaaggttgtaagcacggatgaatatgttgcacgcacaaacatatattatcatgcaggaacatccagactacttgcagttggacatccctattttcctattaaaaaacctaacaataacaaaatattagttcctaaagtatcaggattacaatacagggtatttagaatacatttacctgaccccaataagtttggttttcctgacacctcattttataatccagatacacagcggctggtttgggcctgtgtaggtgttgaggtaggtcgtggtcagccattaggtgtgggcattagtggccatcctttattaaataaattggatgacacagaaaatgctagtgcttatgcagcaaatgcaggtgtggataatagagaatgtatatctatggattacaaacaaacacaattgtgtttaattggttgcaaaccacctataggggaacactggggcaaaggatccccatgtaccaatgttgcagtaaatccaggtgattgtccaccattagagttaataaacacagttattcaggatggtgatatggttgatactggctttggtgctatggactttactacattacaggctaacaaaagtgaagttccactggatatttgtacatctatttgcaaatatccagattatattaaaatggtgtcagaaccatatggcgacagcttatttttttatttacgaagggaacaaatgtttgttagacatttatttaatagggctggtactgttggtgaaaatgtaccagacgatttatacattaaaggctctgggtctactgcaaatttagccagttcaaattattttcctacacctagtggttctatggttacctctgatgcccaaatattcaataaaccttattggttacaacgagcacagggccacaataatggcatttgttggggtaaccaactatttgttactgttgttgatactacacgcagtacaaatatgtcattatgtgctgccatatctacttcagaaactacatataaaaatactaactttaaggagtacctacgacatggggaggaatatgatttacagtttatttttcaactgtgcaaaataaccttaactgcagacgttatgacatacatacattctatgaattccactattttggaggactggaattttggtctacaacctcccccaggaggcacactagaagatacttataggtttgtaacatcccaggcaattgcttgtcaaaaacatacacctccagcacctaaagaagatccccttaaaaaatacactttttgggaagtaaatttaaaggaaaagttttctgcagacctagatcagtttcctttaggacgcaaatttttactacaagcaggattgaaggccaaaccaaaatttacattaggaaaacgaaaagctacacccaccacctcatctacctctacaactgctaaacgcaaaaaacgtaagctgtaagtattgtatgtatgttgaattagtgttgtttgttgtgtatatgtttgtatgtgcttgtatgtgcttgtaaatattaagttgtatgtgtgtttgtatgtatggtataataaacacgtgtgtatgtgtttttaaatgcttgtgtaactattgtgtcatgcaacataaataaacttattgtttcaacacctactaattgtgttgtggttattcattgtatataaactatatttgctacatcctgtttttgttttatatatactatattttgtagcgccagcggccattttgtagcttcaaccgaattcggttgcatgctttttggcacaaaatgtgtttttttaaatagttctatgtcagcaactatggtttaaacttgtacgtttcctgcttgccatgcgtgccaaatccctgttttcctgacctgcactgcttgccaaccattccattgttttttacactgcactatgtgcaactactgaatcactatgtacattgtgtcatataaaataaatcactatgcgccaacgccttacataccgctgttaggcacatatttttggcttgttttaactaacctaattgcatatttggcataaggtttaaacttctaaggccaactaaatgtcaccctagttcatacatgaactgtgtaaaggttagtcatacattgttcatttgtaaaactgcacatgggtgtgtgcaaaccgttttgggttacaaatttacaagcaacttatataataatactaaactacaataattcatgtataaaactaagggcgtaaccgaaatcggttgaaccgaaaccggttagtataaaagcagacattttatgcaccaaaagagaactgcaatgtttcaggacccacaggagcgacccagaaagttaccacagttatgcacagagctgcaaacaactatacatgatataatattagaatgtgtgtactgcaagcaacagttactgcgacgtgaggtatatgactttgcttttcgggatttatgcatagtatatagagatgggaatccatatgctgtatgtgataaatgtttaaagttttattctaaaattagtgagtatagacattattgttatagtttgtatggaacaacattagaacagcaatacaacaaaccgttgtgtgatttgttaattaggtgtattaactgtcaaaagccactgtgtcctgaagaaaagcaaagacatctggacaaaaagcaaagattccataatataaggggtcggtggaccggtcgatgtatgtcttgttgcagatcatcaagaacacgtagagaaacccagctgtaatcatgcatggagatacacctacattgcatgaatatatgttagatttgcaaccagagacaactgatctctactgttatgagcaattaaatgacagctcagaggaggaggatgaaatagatggtccagctggacaagcagaaccggacagagcccattacaatattgtaaccttttgttgcaagtgtgactctacgcttcggttgtgcgtacaaagcacacacgtagacattcgtactttggaagacctgttaatgggcacactaggaattgtgtgccccatctgttctcagaaaccataatctacc

SEQ ID NO: 38 - DNA, 7906 bp, Homo sapiens
  source 1..7906: mol_type = genomic DNA; note = UNCseq1938
atggctgatcctgcaggtaccaatggggaagagggtacgggatgtaatggatggttttatgtagaggctgtagtggaaaaaaaaacaggggatgctatatcagatgacgagaacgaaaatgacagtgatacaggtgaagatttggtagattttatagtaaatgataatgattatttgacacaggcagaaacagagacagcacatgcgttgtttactgcacaggaagcaaaagaacatagagatgcagtacaggttctaaaacgaaagtatttgggtagtccacttagtgatattagtgaatgtgtagacaataatattagtcctagattaaaagccatatgtatagaaaaacaaagtagagctgcaaaaaggagattatttgaaagcgaagacagcgggtatggcaatactgaagtggaaactcagcagatgttacaggtagaagggcgccatgagactgaaacaccatgtagtcagtatagtggtggaagtgggggtggtagcagtcagtatagtagtggaagtgggggagagggtgttagtgaaagacacactatatgcgaaacaccacttacaaatattttaaatgtactaaaaactagtaatgcaaaggcagcaatgctagcaaaatttaaagagttatacggggtgagttttacagaattagtaagaccatttaaaagtaataaatcaacgtgttgcgattggtgtattgctgcatttggacttacacccagtatagctgacagtataaaaacattattacaacaatattgtttatatttacacattcaaagtttagcgtgttcatggggaatggttgtgttactattagtaagatataaatgtggaaaaaatagagaaacaattgaaaaattgatgtctaaactattatgtgtgtctccaatgtgtatgatgatagagcctccaaaattgcgtagtacagcagcagcattatattggtataaaacaggtatgtcaaatattagtgaagtgtatggagacacgccagaatggatacaaagacaaacagtattacaacatagttttaatgattgtacatttgaattatcacagatggtacaatgggcctacgataatgacatagtagacgatagtgaaattgcatataaatatgcacaattggcagacactaatagtaatgcaagtgcctttttaaaaagtaattcacaggcaaaaattgtaaaggattgtgcaacaatgtgtagacattataaacgagcagaaaaaaaacaaatgagtatgagtcaatggataaaatatagatgtgatagggtagatgatggaggtgattggaagcaaattgttatgtttttaaggtatcaaggtgtagactttatgtcatttttaagtgcattaaaaaaatttctgcaaggtatacctaaaaaaaattgcatattattatatggtgcagctaacacaggtaaatcattatttggtatgagtttaatgaaattcttgcaagggtctgtaatatgttttgtaaattctaaaagccatttttggttacaaccattagcagatgccaaaataggtatgttagatgatgctacagtgccctgttggaactacatagatgacaatttaagaaatgcattggatggaaatttagtttctatggatgtaaagcatagaccattggtacaactaaaatgccctccattattaattacatctaacattaatgctggtacagattccaggtggccttatttacataatcgattggtggtgtttacatttccaaatgagtttccatttgacaaaaacggaaatccagtgtatgagcttaatgataagaactggaaatcctttttctcaaggacgtggtccagattaagtttgcacgaggacgaggacaaggaaaacgatggagactctttgccaacgtttaaatgtgtgtcaggacaaaatactaacacattatgaaaatgatagtacagacctacgtgaccatatagactattggaaacaaatgcgcctagaatgtgctatttattacaaggccagagaaatgggatttaaacatattaaccaccaggtggtgccaacactggctgtatcaaagaataaagcattacaagcaattgaactgcaactaacgttagaaacaatatataactcacaatatagtaatgaaaagtggacattacaagacgttagccttgaagtgtatttaactgcaccaacaggatgtataaaaaaacatggatatacagtggaagtgcagtttgatggagacatatgcaatacaatgcattatacaaactggaaacatatatatatttgtgaagacacatcagtaactgtggtagagggtcaagttgactattatggtatatattatgttcatgaaggaatacaaacatattttgtgcagtttaaagatgatgcagaaaaatatagtaaaaataaagtatgggaagttcatgcgggtggtcaggtaatattatgtcctacatctgtgtttagcagcgacgaagtatcctctgctgaaattactaggcagcacttggccaaccactccgccgcgacccataccaaagccgtcgccttgggcaccaaagaaacacagacgactatccagcgaccaagattagagccagacaccggaaacccctgccacaccaacaagttgttgcacagagactccgtggacagtgctccaatcctcactgcagttaacagctcacacaaaggacggattaactgtaatagtaacactacacccatagtacatttaaaaggtgatgctaatactttaaaatgtttaagatacagatttaaaaagcattgtaaattgtatacagcagtgtcgtccacatggcattggacaggacataatgtaaaacataaaagtgcaattgttacacttacatatgatagtgaatgtcaacgtgaacaatttttgtctcaagtgaaaataccaaaaactattacagtgtctactggatttatgtctatatgacaaaccttgatactgcatccacaacattactggcgtgctttttgctttgcttttgtgtgcttttgtgtgtctgcctattaatacgtccgctgcttttgtctgtgtctacatacacatcattaatactattggtattagtattgtggataacagcagcctctgcatttaggtgttttattgtatatattatatttgtttatataccattatttttaatacatacacatgcacgctttttaattacataatgtatatgtacataatgtaattgttacatataattgttgtataccataaattactatttttttttttttattttcatatataatttttttttttgtttgtttgtgtgttttttaataaactgttattacttaacaatgcgacacaaacgttctgcaaaacgcacaaaacgtgcatcggccacccaactttataaaacatgcaaacaggcaggtacatgtccacctgacattatacctaaggttgaaggcaaaactattgctgatcaaatattacaatatggaagtatgggtgtattttttggtgggttaggaattggaacagggtcgggtacaggcggacgcactgggtacattccattgggaacaaggcctcccacagctacagatacacttgctcctgtaagaccccctttaacagtagatcctgtgggcccttctgatccttctatagtttctttagtggaagaaactagttttattgatgctggtgcaccaacccctgtaccttccattcccccagatgtatcaggatttagtattacaacttcaactgataccacacctgctatattagatattaataatactgttactactgttactacacataataatcccacttttactgacccatctgtattgcagcctccaacacctgcagaaactggagggcattttacactttcatcatccactattagtacacataattatgaagaaattcctatggatacatttattgttagcacaaaccctaacacagtaactagtagcacacccataccggggtctcgcccagtggcacgcctaggattatatagtcgcacaacacaacaagttaaggttgtggaccctgcttttgtaaccgctcccactaaacttattacatatgataatcctgcatatgaaggtatagatgtggataatacattttattttcctagtaatgataatagtattaatatagctccagatcctgactttttggatatagttgctttacataggccagcattaacctctaggcgtactggcattagatacagtagaattggtaataaacaaacactacgtactcgtagtggaaaatctataggtgctaaggtacattattattatgatttaagtagtattaatcctgcagaagaaatagaattacaaactataacaccttctacatatacaaccacttcccatgcagcctcaccaacttctattaataatggattatatgatatttatgcagatgactttattacagatactgttacaaccccagtaccagctataccctctacatccttatcaggttatattcctgcaaatacaacaattccttttggtggtgcatacaatattcctttagtatcaggacctgatatacctattaatacaactgaccaaactccttcattaattcctatagttccagggtctccacaatatacaattattgctgatggaggtgacttttatttacatcctagttattacatgttacgaaaacgacgtaaacgtttaccatattttttttcagatgtctctttggctgcctagtgaggccactgtctacttgcctcctgtcccagtatctaaagttgtaagcacggatgaatatgttgcacgcacaaacatatattatcatgcaggaacatccagactacttgcagttggacatccctattttcctattaaaaaacctaacaataacaaaatattagttcctaaagtatcaggattacaatacagggtatttagaatatatttacctgaccccaataagtttggttttcctgacacctcattttacaatccagatacacagcggctggtttgggcctgtgtaggtgttgaggtaggtcgtggtcagccattaggtgtgggcattagtggccatcctttattaaataaattggatgacacagaaaatgctagtgcttatgcagcaaatgcaggtgtggataatagagaatgtatatctatggattacaaacaaacacaattgtgtttaattggttgcaaaccacctataggggaacactggggcaaaggatccccatgtaacaatgttgcagtaactccaggtgattgtccaccattagagttaataaacacagttattcaggatggtgatatggttgataccggctttggtgctatggactttactacattacaggctaacaaaagtgaagttccactggatatttgtacatctatttgcaaatatccagattatattaaaatggtgtcagaaccatatggcgacagcttatttttttatttacgaagggaacaaatgtttgttagacatttatttaatagggctggtgctgttggtgaaaatgtaccagacgatttatacattaaaggctctgggtctactgcaaatttagccagttcaaattattttcctacacctagtggttctatggttacctctgatgcccaaatatttaataaaccttattggttacaacgagcacagggccacaataatggcatttgttggggtaaccaactatttgttactgttgttgatactacacgcagtacaaatatgtcattatgtgctgccatatctacttcagaacctacatataaaaatactaactttaaagagtacctacgacatggggaggaatatgatttacagtttatttttcaactgtgcaaaataaccttaactgcagacgttatgtcatacatacattctatgaattccactattttggaggactggaattttggtttacaacctcctccaggaggcacactagaagatacttataggtttgtaacatcccaggcaattgcttgtcaaaaacatacacctccagcacctaaagaagatccccttaaaaaatatactttttgggaagtaaatttaaaagaaaagttttctgcagacctagatcagtttcctttaggacgcaaatttttactacaagcaggatttaaggccaaaccaaaatttacattaggaaaacgaaaagctacacccaccacctcatctacctctacaactgctaaacgcaaaaaacgtaagctgtaagtattgtatgtatgttgaattagtgttgtttgttgtttatatgtttgtatgtgcttgtatgtgcttgtaaatattacgttgtatgtgtgtttgtatgtatggtataataaacacgtgtgtatgtgtttttaaatgcttgtgtaactattgtgtcatgcaacataaataaacttattgtttcatcacctactaattgtgttgtggttattcattgtatataaactatatttgctacattttgtttttgttttatatatactatattttgtagcgccagcggccattttgtagcttcaaccgaattcggttgcatgctttttggcacaaactgtatttttttaaatagttctatgtcagcaactatagtttaaacttgtacgtttcctgcttgccatgcgtgccaaatccctgttttcctgacctgcactgcttgccaaccattccattgttttttacactgcactatgtgcaactactgaatcactatgtacattgtgtcatataaaataaattactatgcgccaacgccttaaataccgctgttaggcacatatttttggcttgttttaactcacctaattgcatagttggcataaggtttaaacttttaaggccaactaaatgtcaccttagttcatacatgaactgtgtaaaggttagtcatacattgttcatttgtaaaactgcacatgggtgtgtgcaaaccgttttgggttacacatttacaaggaacttatataataatactaaactacaataattcatgtataaaactaagggcgtaaccgaaatcggttgaaccgaaaccggttagtataaaagcagacattttatgcaccaaaagagaactgcaatgtttcaggacccacaggagcgacccagaaagttaccacatttatgcacagagctgcaaacaactatacatgatataatattagaatgtgtgtactgcaagcaacagttactgcgacgtgaggtatatgactttgcttttcgggatttatgcatagtatatagagatgggaatccatatgcagtgtgtgataaatgtttaaagttttattctaaaattagtgagtatagatattattgttatagtgtgtatggaacaacattagaacagcaatacaacaaaccgttgtgtgatttgttaattaggtgtattaactgtcaaaagccactgtgtcctgaagaaaagcaaagacatctggacaaaaagcaaagattccataatataaggggtcggtggaccggtcgatgtatgtcttgttgcagatcatcgagaacacgtagagaaacccagctgtaatcatgcatggagatacacctacattgcatgaatatatgttagatttgcaaccagagacaactgatctctactgttatgagcaattaaatgacagctcagaggaggaggatgaaatagatggtccagctggacaagcagaaccggacagagcccattacaatattgtaaccttctgttgcaagtgtgactctacgcttcggttgtgcgtacaaagcacacacgtagacatccgtacgttggaagacctgttaatgggcacactaggaattgtgtgccccatctgttctcagaaaccataatctacc

SEQ ID NO: 39 - DNA, 7906 bp, Homo sapiens
  source 1..7906: mol_type = genomic DNA; note = UNCseq1954
atggctgatcctgcaggtaccaatggggaagagggtacgggatgtaatggatggttttatgtagaggctgtagtggaaaaaaaaacaggggatgctatatcagatgacgagaacgaaaatgacagtgatacaggtgaagatttggtagattttatagtaaatgataatgattatttaacacaggcagaaacagagacagcacatgcgttgtttactgcacaggaagcaaaacaacatagagatgcagtacaggttctaaaacgaaagtatttgggtagtccacttagtgatattagtggatgtgtagacaataatattagtcctagattaaaagctatatgtatagaaaaacaaagtagagctgcaaaaaggagattatttgaaagcgaagacagcgggtatggcaatactgaagtggaaactcagcagatgttacaggtagaagggcgccatgagactgaaacaccatgtagtcagtatagtggtggaagtgggggtggttgcagtcagtacagtagtggaagtgggggagagggtgttagtgaaagacacactatatgccaaacaccacttacaaatattttaaatgtactaaaaactagtaatgcaaaggcagcaatgttagcaaaatttaaagagttatacggggtgagtttttcagaattagtaagaccatttaaaagtaataaatcaacgtgttgcgattggtgtattgctgcatttggacttacacccagtatagctgacagtataaaaacactattacaacaatattgtttatatttacacattcaaagtttagcatgttcatggggaatggttgtgttactattagtaagatataaatgtggaaaaaatagagaaacaattgaaaaattgctgtctaaactattatgtgtgtctccaatgtgtatgatgatagagcctccaaaattgcgtagtacagcagcagcattatattggtataaaacaggtatatcaaatattagtgaagtgtatggagacacgccagaatggatacaaagacaaacagtattacaacatagttttaatgattgtacatttgaattatcacagatggtacaatgggcctacgataatgacatagtagacgatagtgaaattgcatataaatatgcacaattggcagacactaatagtaatgcaagtgcctttctaaaaagtaattcacaggcaaaaattgtaaaggattgtgcaacaatgtgtagacattataaacgagcagaaaaaaaacaaatgagtatgagtcaatggataaaatatagatgtgatagggtagatgatggaggtgattggaagcaaattgttatgtttttaaggtatcaaggtgtagagtttatgtcatttttaactgcattaaaaagatttttgcaaggcatacctaaaaaaaattgcatattactatatggtgcagctaacacaggtaaatcattatttggtatgagtttaatgaaatttctgcaagggtctgtaatatgttttgtaaattctaaaagccatttttggttacaaccattagcagatgccaaaataggtatgttagatgatgctacagtgccctgttggaactacatagatgacaatttaagaaatgcattggatggaaatttagtttctatggatgtaaagcatagaccattggtacaactaaaatgccctccattattaattacatctaacattaatgctggtacagattctaggtggccttatttacataatagattggtggtgtttacatttcctaatgagtttccatttgacgaaaacggaaatccagtgtatgagcttaatgataagaactggaaatcctttttctcaaggacgtggtccagattaagtttgcacgaggacgaggacaaggaaaacgatggagactctttgccaacgtttaaatgtgtgtcaggacaaaatactaacacattatgaaaatgatagtacagacctacgtgaccatatagactattggaaacacatgcgcctagaatgtgctatttattacaaggccagagaaatgggatttaaacatattaaccaccaggtggtgccaacactggctgtatcaaagaataaagcattacaagcaattgaactgcaactaacgttagaaacaatatataactcacaatatagtaatgaaaagtggacattacaagacgttagccttgaagtgtatttaactgcaccaacaggatgtataaaaaaacatggatatacagtggaagtgcagtttgatggagacatatgcaatacaatgcattatacaaactggacacatatatatatttgtgaagaagcatcagtaactgtggtagagggtcaagttgactattatggtttatattatgttcatgaaggaatacgaacatattttgtgcagtttaaagatgatgcagaaaaatatagtaaaaataaagtatgggaagttcatgcgggtggtcaggtaatattatgtcctacatctgtgtttagcagcaacgaagtatcctctcctgaaattattaggcagcacttggccaaccaccccgccgcgacccataccaaagccgtcgccttgggcaccaaagaaacacagacgactatccagcgaccaagatcagagccagacaccggaaacccctgccacaccactaagttgttgcacagagactcagtggacagtgctccaatcctcactgcatttaacagctcacacaaaggacggattaactgtaatagtaacactacacccatagtacatttaaaaggtgatgctaatactttaaaatgtttaagatatagatttaaaaagcattgtacattgtatactgcagtgtcgtctacatggcattggacaggacataatgtaaaacataaaagtgcaattgttacacttacatatgatagtgaatggcaacgtgaccaatttttgtctcaagttaaaataccaaaaactattacagtgtctactggatttatgtctatatgacaaatcttgatactgcatccacaacattactggcgtgctttttgctttgcttttgtgtgcttttgtgtgtctgcctattaatacgtccgctgcttttgtctgtgtctacatacacatcattaataatattggtattactattgtggataacagcagcctctgcgtttaggtgttttattgtatatattatatttgtttatataccattatttttaatacatacacatgcacgctttttaattacataatgtatatgtacataatgtaattgttacatataattgttgtataccataacttactattttttcttttttattttcatatataatttttttttttgtttgtttgtttgttttttaataaactgttattacttaacaatgcgacacaaacgttctgcaaaacgcacaaaacgtgcatcggctacccaactttataaaacatgcaaacaggcaggtacatgtccacctgacattatacctaaggttgaaggcaaaactattgctgatcaaatattacaatatggaagtatgggtgtattttttggtgggttaggaattggaacagggtcgggtacaggcggacgcactgggtatattccattgggaacaaggcctcccacagctacagatacacttgctcctgtaagaccccctttaacagtagatcctgtgggcccttctgatccttctatagtttctttagtggaagaaactagttttattgatgctggtgcaccaacatctgtaccttccattcccccagatgtatcaggatttagtattactacttcaactgataccacacctgctatattagatattaataatactgttactactgttactacacataataatcccactttcactgacccatctgtattgcagcctccaacacctgcagaaactggagggcattttacactttcatcatccactattagtacacataattatgaagaaattcctatggatacatttattgttagcacaaaccctaacacagtaactagtagcacacccataccagggtctcgcccagtggcacgcctaggattatatagtcgcacaacacaacaggttaaagttgtagaccctgcttttgtaaccactcccactaaacttattacatatgataatcctgcatatgaaggtatagatgtggataatacattatatttttctagtaatgataatagtattaatatagctccagatcctgactttttggatatagttgctttacataggccagcattaacctctaggcgtactggcattaggtacagtagaattggtaataaacaaacactacgtactcgtagtggaaaatctataggtgctaaggtacattattattatgatttcagtactattgatcctgcagaagaaatagaattacaaactataacaccttctacatatactaccacttcacatgcagcctcacctacttctattaataatggattatatgatatttatgcagatgactttattacagatacttctacaaccccggtaccatctgtaccctctacatctttatcaggttatattcctgcaaatacaacaattccttttggtggtgcatacaatattcctttagtatcaggtcctgatatacccattaatataactgaccaagctccttcattaattcctatagttccagggtctccacaatatacaattattgctgatgcaggtgacttttatttacatcctagttattacatgttacgaaaacgacgtaaacgtttaccatattttttttcagatgtctctttggctgcctagtgaggccactgtctacttgcctcctgtcccagtatctaaggttgtaagcacggatgaatatgttgcacgcacaaacatatattatcatgcaggaacatccagactacttgcagttggacatccctattttcctattaaaaaacctaacaataacaaaatattagttcctaaagtatcaggattacaatacagggtatttagaatacatttacctgaccccaataagtttggttttcctgacacctcattttataatccagatacacagcggctggtttgggcctgtgtaggtgttgaggtaggtcgtggtcagccattaggtgtgggcattagtggccatcctttattaaataaattggatgacacagaaaatgctagtgcttatgcagcaaatgcaggtgtggataatagagaatgtatatctatggattacaaacaaacacaattgtgtttaattggttgcaaaccacctataggggaacactggggcaaaggatccccatgtaccaatgttgcagtaaatccaggtgattgtccaccattagagttaataaacacagttattcaggatggtgatatggttgatactggctttggtgctatggactttactacattacaggctaacaaaagtgaagttccactggatatttgtacatctatttgcaaatatccagattatattaaaatggtgtcagaaccatatggcgacagcttatttttttatttacgaagggaacaaatgtttgttagacatttatttaatagggctggtactgttggtgaaaatgtaccagacgatttatacattaaaggctctgggtctactgcaaatttagccagttcaaattattttcctacacctagtggttctatggttacctctgatgcccaaatattcaataaaccttattggttacaacgagcacagggccacaataatggcatttgttggggtaaccaactatttgttactgttgttgatactacacgcagtacaaatatgtcattatgtgctgccatatctacttcagaaactacatataaaaatactaactttaaggagtacctacgacatggggaggaatatgatttacagtttatttttcaactgtgcaaaataaccttaactgcagacgttatgacatacatacattctatgaattccactattttggaggactggaattttggtctacaacctcccccaggaggcacactagaagatacttataggtttgtaacatcccaggcaattgcttgtcaaaaacatacacctccagcacctaaagaagatccccttaaaaaatacactttttgggaagtaaatttaaaggaaaagttttctgcagacctagatcagtttcctttaggacgcaaatttttactacaagcaggattgaaggccaaaccaaaatttacattaggaaaacgaaaagctacacccaccacctcatctacctctacaactgctaaacgcaaaaaacgtaagctgtaagtattgtatgtatgttgaattagtgttgtttgttgtgtatatgtttgtatgtgcttgtatgtgcttgtaaatattaagttgtatgtgtgtttgtatgtatggtataataaacacgtgtgtatgtgtttttaaatgcttgtgtaactattgtgtcatgcaacataaataaacttattgtttcaacacctactaattgtgttgtggttattcattgtatataaactatatttgctacatcctgtttttgttttatatatactatattttgtagcgccagcggccattttgtagcttcaaccgaattcggttgcatgctttttggcacaaaatgtgtttttttaaatagttctatgtcagcaactatggtttaaacttgtacgtttcctgcttgccatgcgtgccaaatccctgttttcctgacctgcactgcttgccaaccattccattgttttttacactgcactatgtgcaactactgaatcactatgtacattgtgtcatataaaataaatcactatgcgccaacgccttacataccgctgttaggcacatatttttggcttgttttaactaacctaattgcatatttggcataaggtttaaacttctaaggccaactaaatgtcaccctagttcatacatgaactgtgtaaaggttagtcatacattgttcatttgtaaaactgcacatgggtgtgtgcaaaccgttttgggttacacatttacaagcaacttatataataatactaaactacaataattcatgtataaaactaagggcgtaaccgaaatcggttgaaccgaaaccggttagtataaaagcagacattttatgcaccaaaagagaactgcaatgtttcaggacccacaggagcgacccagaaagttaccacagttatgcacagagctgcaaacaactatacatgatataatattagaatgtgtgtactgcaagcaacagttactgcgacgtgaggtatatgactttgcttttcgggatttatgcatagtatatagagatgggaatccatatgctgtatgtgataaatgtttaaagttttattctaaaattagtgagtatagacattattgttatagtttgtatggaacaacattagaacagcaatacaacaaaccgttgtgtgatttgttaattaggtgtattaactgtcaaaagccactgtgtcctgaagaaaagcaaagacatctggacaaaaagcaaagattccataatataaggggtcggtggaccggtcgatgtatgtcttgttgcagatcatcaagaacacgtagagaaacccagctgtaatcatgcatggagatacacctacattgcatgaatatatgttagatttgcaaccagagacaactgatctctactgttatgagcaattaaatgacagctcagaggaggaggatgaaatagatggtccagctggacaagcagaaccggacagagcccattacaatattgtaaccttttgttgcaagtgtgactctacgcttcggttgtgcgtacaaagcacacacgtagacattcgtactttggaagacctgttaatgggcacactaggaattgtgtgccccatctgttctcagaaaccataatctacc

SEQ ID NO: 40 - DNA, 7906 bp, Homo sapiens
  source 1..7906: mol_type = genomic DNA; note = UNCseq1958
atggctgatcctgcaggtaccaatggggaagagggtacgggatgtaatggatggttttatgtagaggctgtagtggaaaaaaaaacaggggatgctatatcagatgacgagaacgaaaatgacagtgatacaggtgaagatttggtagattttatagtaaatgataatgattatttaacacaggcagaaacagagacagcacatgcgttgtttactgcacaggaagcaaaacaacatagagatgcagtacaggttctaaaacgaaagtatttgggtagtccacttagtgatattagtggatgtgtagacaataatattagtcctagattaaaagctatatgtatagaaaaacaaagtagagctgcaaaaaggagattatttgaaagcgaagacagcgggtatggcaatactgaagtggaaactcagcagatgttacaggtagaagggcgccatgagactgaaacaccatgtagtcagtatagtggtggaagtgggggtggttgcagtcagtacagtagtggaagtgggggagagggtgttagtgaaagacacactatatgccaaacaccacttacaaatattttaaatgtactaaaaactagtaatgcaaaggcagcaatgttagcaaaatttaaagagttatacggggtgagtttttcagaattagtaagaccatttaaaagtaataaatcaacgtgttgcgattggtgtattgctgcattcggacttacacccagtatagctgacagtataaaaacactattacaacaatattgtttatatttacacattcaaagtttagcatgttcatggggaatggttgtgttactattagtaagatataaatgtggaaaaaatagagaaacaattgaaaaattgctgtctaaactattatgtgtgtctccaatgtgtatgatgatagagcctccaaaattgcgtagtacagcagcagcattatattggtataaaacaggtatatcaaatattagtgaagtgtatggagacacgccagaatggatacaaagacaaacagtattacaacatagttttaatgattgtacatttgaattatcacagatggtacaatgggcctacgataatgacatagtagacgatagtgaaattgcatataaatatgcacaattggcagacactaatagtaatgcaagtgcctttctaaaaagtaattcacaggcaaaaattgtaaaggattgtgcaacaatgtgtagacattataaacgagcagaaaaaaaacaaatgagtatgagtcaatggataaaatatagatgtgatagggtagatgatggaggtgattggaagcaaattgttatgtttttaaggtatcaaggtgtagagtttatgtcatttttaactgcattaaaaagatttttgcaaggcatacctaaaaaaaattgcatattactatatggtgcagctaacacaggtaaatcattatttggtatgagtttaatgaaatttctgcaagggtctgtaatatgttttgtaaattctaaaagccatttttggttacaaccattagcagatgccaaaataggtatgttagatgatgctacagtgccctgttggaactacatagatgacaatttaagaaatgcattggatggaaatttagtttctatggatgtaaagcatagaccattggtacaactaaaatgccctccattattaattacatctaacattaatgctggtacagattctaggtggccttatttacataatagattggtggtgtttacatttcctaatgagtttccatttgacgaaaacggaaatccagtgtatgagcttaatgataagaactggaaatcctttttctcaaggacgtggtccagattaagtttgcacgaggacgaggacaaggaaaacgatggagactctttgccaacgtttaaatgtgtgtcaggacaaaatactaacacattatgaaaatgatagtacagacctacgtgaccatatagactattggaaacacatgcgcctagaatgtgctatttattacaaggccagagaaatgggatttaaacatattaaccaccaggtggtgccaacactggctgtatcaaagaataaagcattacaagcaattgaactgcaactaacgttagaaacaatatataactcacaatatagtaatgaaaagtggacattacaagacgttagccttgaagtgtatttaactgcaccaacaggatgtataaaaaaacatggatatacagtggaagtgcagtttgatggagacatatgcaatacaatgcattatacaaactggacacatatatatatttgtgaagaagcatcagtaactgtggtagagggacaagttgactattatggtttatattatgttcatgaaggaatacgaacatattttgtgcagtttaaagatgatgcagaaaaatatagtaaaaataaagtatgggaagttcatgcgggtggtcaggtaatattatgtcctacatctgtgtttagcagcaacgaagtatcctctcctgaaattattaggcagcacttggccaaccaccccgccgcgacccataccaaagccgtcgccttgggcaccgaagaaacacagacgactatccagcgaccaagatcagagccagacaccggaaacccctgccacaccactaagttgttgcacagagactcagtggacagtgctccaatcctcactgcatttaacagcgcacacaaaggacggattaactgtaatagtaacactacacccatagtacatttaaaaggtgatgctaatactttaaaatgtttaagatatagatttaaaaagcattgtacattgtatactgcagtgtcgtctacatggcattggacaggacataatgtaaaacataaaagtgcaattgttacacttacatatgatagtgaatggcaacgtgaccaatttttgtctcaagttaaaataccaaaaactattacagtgtctactggatttatgtctatatgacaaatcttgatactgcatccacaacattactggcgtgctttttgctttgcttttgtgtgcttttgtgtgtctgcctattaatacgtccgctgcttttgtctgtgtctacatacacatcattaataatattggtattactattgtggataacagcagcctctgcgtttaggtgttttattgtatatattatatttgtttatataccattatttttaatacatacacatgcacgctttttaattacataatgtatatgtacataatgtaattgttacatataattgttgtataccataacttactattttttcttttttattttcatatataatttttttttgtgtttgtttgtttgttttttaataaactgttattacttaacaatgcgacacaaacgttctgcaaaacgcacaaaacgtgcatcggctacccaactttataaaacatgcaaacaggcaggtacatgtccacctgacattatacctaaggttgaaggcaaaactattgctgatcaaatattacaatatggaagtatgggtgtattttttggtgggttaggaattggcacagggtcgggtacaggcggacgcactgggtatattccattgggaacaaggcctcccacagctacagatacacttgctcctgtaagaccccctttaacagtagatcctgtgggcccttctgatccttctatagtttctttagtggaagaaactagttttattgatgctggtgcaccaacatctgtaccttccattcccccagatgtatcaggatttagtattactacttcaactgataccacacctgctatattagatattaataatactgttactactgttactacacataataatcccactttcactgacccatctgtattgcagcctccaacacctgcagaaactggagggcattttacactttcatcatccactattagtacacataattatgaagaaattcctatggatacatttattgttagcacaaaccctaacacagtaactagtagcacacccataccagggtctcgcccagtggcacgcctaggattatatagtcgcacaacacaacaggttaaagttgtagaccctgcttttgtaaccactcccactaaacttattacatatgataatcctgcatatgaaggtatagatgtggataatacattatatttttctagtaatgataatagtattaatatagctccagatcctgactttttggatatagttgctttacataggccagcattaacctctaggcgtactggcattaggtacagtagaattggtaataaacaaacactacgtactcgtagtggaaaatctataggtgctaaggtacattattattatgatttcagtactattgatcctgcagaagaaatagaattacaaactataacaccttctacatatactaccacttcacatgcagcctcacctacttctattaataatggattatatgatatttatgcagatgactttattacagatacttctacaaccccggtaccatctgtaccctctacatctttatcaggttatattcctgcaaatacaacaattccttttggtggtgcatacaatattcctttagtatcaggtcctgatatacccattaatataactgaccaagctccttcattaattcctatagttccagggtctccacaatatacaattattgctgatgcaggtgacttttatttacatcctagttattacatgttacgaaaacgacgtaaacgtttaccatattttttttcagatgtctctttggctgcctagtgaggccactgtctacttgcctcctgtcccagtatctaaggttgtaagcacggatgaatatgttgcacgcacaaacatatattatcatgcaggaacatccagactacttgcagttggacatccctattttcctattaaaaaacctaacaataacaaaatattagttcctaaagtatcaggattacaatacagggtatttagaatacatttacctgaccccaataagtttggttttcctgacacctcattttataatccagatacacagcggctggtttgggcctgtgtaggtgttgaggtaggtcgtggtcagccattaggtgtgggcattagtggccatcctttattaaataaattggatgacacagaaaatgctagtgcttatgcagcaaatgcaggtgtggataatagagaatgtatatctatggattacaaacaaacacaattgtgtttaattggttgcaaaccacctataggggaacactggggcaaaggatccccatgtaccaatgttgcagtaaatccaggtgattgtccaccattagagttaataaacacagttattcaggatggtgatatggttgatactggctttggtgctatggactttactacattacaggctaacaaaagtgaagttccactggatatttgtacatctatttgcaaatatccagattatattaaaatggtgtcagaaccatatggcgacagcttatttttttatttacgaagggaacaaatgtttgttagacatttatttaatagggctggtactgttggtgaaaatgtaccagacgatttatacattaaaggctctgggtctactgcaaatttagccagttcaaattattttcctacacctagtggttctatggttacctctgatgcccaaatattcaataaaccttattggttacaacgagcacagggccacaataatggcatttgttggggtaaccaactatttgttactgttgttgatactacacgcagtacaaatatgtcattatgtgctgccatatctacttcagaaactacatataaaaatactaactttaaggagtacctacgacatggggaggaatatgatttacagtttatttttcaactgtgcaaaataaccttaactgcagacgttatgacatacatacattctatgaattccactattttggaggactggaattttggtctacaacctcccccaggaggcacactagaagatacttataggtttgtaacatcccaggcaattgcttgtcaaaaacatacacctccagcacctaaagaagatccccttaaaaaatacactttttgggaagtaaatttaaaggaaaagttttctgcagacctagatcagtttcctttaggacgcaaatttttactacaagcaggattgaaggccaaaccaaaatttacattaggaaaacgaaaagctacacccaccacctcatctacctctacaactgctaaacgcaaaaaacgtaagctgtaagtattgtatgtatgttgaattagtgttgtttgttgtgtatatgtttgtatgtgcttgtatgtgcttgtaaatattaagttgtatgtgtgtttgtatgtatggtataataaacacgtgtgtatgtgtttttaaatgcttgtgtaactattgtgtcatgcaacataaataaacttattgtttcaacacctactaattgtgttgtggttattcattgtatataaactatatttgctacatcctgtttttgttttatatatactatattttgtagcgccagcggccattttgtagcttcaaccgaattcggttgcatgctttttggcacaaaatgtgtttttttaaatagttctatgtcagcaactatggtttaaacttgtacgtttcctgcttgccatgcgtgccaaatccctgttttcctgacctgcactgcttgccaaccattccattgttttttacactgcactatgtgcaactactgaatcactatgtacattgtgtcatataaaataaatcactatgcgccaacgccttacataccgctgttaggcacatatttttggcttgttttaactaacctaattgcatatttggcataaggtttaaacttctaaggccaactaaatgtcaccctagttcatacatgaactgtgtaaaggttagtcatacattgttcatttgtaaaactgcacatgggtgtgtgcaaaccgttttgggttacacatttacaagcaacttatataataatactaaactacaataattcatgtataaaactaagggcgtaaccgaaatcggttgaaccgaaaccggttagtataaaagcagacattttatgcaccaaaagagaactgcaatgtttcaggacccacaggagcgacccagaaagttaccacagttatgcacagagctgcaaacaactatacatgatataatattagaatgtgtgtactgcaagcaacagttactgcgacgtgaggtatatgactttgcttttcgggatttatgcatagtatatagagatgggaatccatatgctgtatgtgataaatgtttaaagttttattctaaaattagtgagtatagacattattgttatagtttgtatggaacaacattagaacagcaatacaacaaaccgttgtgtgatttgttaattaggtgtattaactgtcaaaagccactgtgtcctgaagaaaagcaaagacatctggacaaaaagcaaagattccataatataaggggtcggtggaccggtcgatgtatgtcttgttgcagatcatcaagaacacgtagagaaacccagctgtaatcatgcatggagatacacctacattgcatgaatatatgttagatttgcaaccagagacaactgatctctactgttatgagcaattaaatgacagctcagaggaggaggatgaaatagatggtccagctggacaagcagaaccggacagagcccattacaatattgtaaccttttgttgcaagtgtgactctacgcttcggttgtgcgtacaaagcacacacgtagacattcgtactttggaagacctgttaatgggcacactaggaattgtgtgccccatctgttctcagaaaccataatctacc

SEQ ID NO: 41 - DNA, 7906 bp, Homo sapiens
  source 1..7906: mol_type = genomic DNA; note = UNCseq1980
atggctgatcctgcaggtaccaatggggaagagggtacgggatgtaatggatggttttatgtagaggctgtagtggaaaaaaaaacaggggatgctatatcagatgacgagaacgaaaatgacagtgatacaggtgaagatttggtagattttatagtaaatgataatgattatttaacacaggcagaaacagagacagcacatgcgttgtttactgcacaggaagcaaaacaacatagagatgcagtacaggttctaaaacgaaagtatttgggtagtccacttagtgatattagtggatgtgtagacaataatattagtcctagattaaaagctatatgtatagaaaaacaaagtagagctgcaaaaaggagattatttgaaagcgaagacagcgggtatggcaatactgaagtggaaactcagcagatgttacaggtagaagggcgccatgagactgaaacaccatgtagtcagtatagtggtggaagtgggggtggttgcagtcagtacagtagtggaagtgggggagagggtgttagtgaaagacacactatatgccaaacaccacttacaaatattttaaatgtactaaaaactagtaatgcaaaggcagcaatgttagcaaaatttaaagagttatacggggtaagtttttcagaattagtaagaccatttaaaagtaataaatcaacgtgttgcgattggtgtattgctgcatttggacttacacccagtatagctgacagtataaaaacactattacaacaatattgtttatatttacacattcaaagtttagcatgttcatggggaatggttgtgttactattagtaagatataaatgtggaaaaaatagagaaacaattgaaaaattgctgtctaaactattatgtgtgtctccaatgtgtatgatgatagagcctccaaaattgcgtagtacagcagcagcattatattggtataaaacaggtatgtcaaatattagtgaagtgtatggagacacgccagaatggatacaaagacaaacagtattacaacatagttttaatgattgtacatttgaattatcacagatggtacaatgggcctacgataatgacatagtagacgatagtgaaattgcatataaatatgcacaattggcagacactaatagtaatgcaagtgcctttctaaaaagtaattcacaggcaaaaattgtaaaggattgtgcaacaatgtgtagacattataaacgagcagaaaaaaaacaaatgagtatgagtcaatggataaaatatagatgtgatagggtagatgatggaggtgattggaagcaaattgttatgtttttaaggtatcaaggtgtagagtttatgtcatttttaactgcattaaaaagatttttgcaaggcatacctaaaaaaaattgcatattactatatggtgcagctaacacaggtaaatcattatttggtatgagtttaataaaatttctgcaagggtctgtaatatgttttgtaaattctaaaagccatttttggttacaaccattagcagatgccaaaataggtatgttagatgatgctacagtgccctgttggaactacatagatgacaatttaagaaatgcattggatggaaatttagtttctatggatgtaaagcatagaccattggtacaactaaaatgccctccattattaattacatctaacattaatgctggtacagattctaggtggccttatttacataatagattggtggtgtttacatttcctaatgagtttccatttgacgaaaacggaaatccagtgtatgagcttaatgataagaactggaaatcctttttctcaaggacgtggtccagattaagtttgcacgaggacgaggacaaggaaaacgatggagactctttgccaacgtttaaatgtgtgtcaggacaaaatactaacacattatgaaaatgatagtacaaacctacgtgaccatatagactattggaaacacatgcgcctagaatgtgctatttattacaaggccagagaaatgggatttaaacatattaaccaccaggtggtgccaacactggctgtatcaaagaataaagcattacaagcaattgaactgcaactaacgttagaaacaatatataactcacaatatagtaatgaaaagtggacattacaagacgttagccttgaagtgtatttaactgcaccaacaggatgtataaaaaaacatggatatacagtggaagtgcagtttgatggagacatatgcaatacaatgcattatacaaactggaaacatatatatatttgtgaagaagcatcagtaactgtggtagagggtcaagttgactattatggtttatattatgttcatgaaggaatacaaacatattttgtgcagtttaaagatgatgcagaaaaatatagtaaaaataaagtatgggaagttcatgcgggtggtcaggtaatattatgtactacatctgtgtttagcagcaacgaagtatcctctcctgaaactattaggcagcacttggccaaccactccgccgcgacccataccaaagccgtcgccttgggcaccaaagaaacacagacgactatccagcgaccaagatcagagccagacaccggaaacccctgccacaccactaagttgctgcacagagactcagtggacagtgctccaatcctcactgcatttaacagctcacacaaaggacggattaactgtaatagtaacactacacccatagtacatttaaaaggtgatgctaatactttaaaatgtttaagatatagatttaaaaagcattgtaaattgtatactgcagtgtcgtctacatggcattggacaggacataatgtaaaacataaaagtgcaattgttacacttacatatgatagtgaatggcaacgtgaacaatttttgtctcaagttaaaataccaaaaactattacagtgtctactggatttatgtctatatgacaaatcttgatactgcatccacaacattactggcgtgctttttgctttgcttttgtgtgcttttgtgtgtctgcctattaatacgtccgctgcttttgtctgtgtctacatacacatcattaatactattggtattactattgtggataacagcagcctctgcgtttaggtgttttattgtatatattgtatttgtttatataccattatttttaatacatactcatgcacgctttttaattacataatgtatatgtacataatgtaattgttacatataattgttgtataccataacttactattttttcttttttatttttatatataatttttttttttgtttgtttgtttgttttttaataaactgttatcacttaacaatgcgacacaaacgttctgcaaaacgcacaaaacgtgcatcggctacccaactttataaaacatgcaaacaggcaggtacatgtccacctgacattatacctaaggttgaaggcaaaactattgctgatcaaatattacaatatggaagtatgggtgtattttttggtgggttaggaattggaacagggtcgggtacaggcggacgcactgggtatattccattgggaacaaggcctcccacagctacagatacacttgctcctgtaagaccccctttaacagtagatcctgtgggcccttctgatccttctatagtttctttagtggaagaaactagttttattgatgctggtgcaccaacatctgtaccttccattcccccagatgtatcaggatttagtattactacttcaactgataccacacctgctatattagatattaataatactgttactactgttactacacataataatcccacttttactgacccatctgtattgcagcctccaacacctgcagaaactggagggcattttacactttcatcatccactattagtacacataattatgaagaaattcctatggatacatttattgttagcacaaaccctaacacagtaactagtagcacacccataccagggtctcgcccagtggcacgcctaggattatatagtcgcacaacacaacaagttaaagttgtagaccctgcttttgtaaccactcccactaaacttattacatatgataatcctgcatatgaaggtatagatgtggataatacattatattttcctaataatgataatagtattaatatagctccagatcctgactttttggatatagttgctttacataggccagcattaacctctaggcgtactggcattaggtacagtagaattggtaataaacaaacactacgtactcgtagtggaaaatctataggtgctaaggtacattattattatgatttcagtactattgatcctgcagaagaaatagaattacaaactataacaccttctacatatactaccacttcacatgcagcctcacctacttctattaataatggattatatgatatttatgcagatgactttattacagatacttttacaaccccggtaccatctgtaccctctacatctttatcaggttatattcctgcaaatacaacaattccttttggtggtgcatacaatattcctttagtatcaggtcctaatatacccattaatataactgaccaagctccttcattacttcctatagttccagggtctccacaatatacaattattgctgatgcaggtgacttttatttacatcctagttattacatgttacgaaaacgacgtaaacgtttaccatattttttttcagatgtctctttggctgcctagtgaggccactgtctacttgcctcctgtcccagtatctaaggttgtaagcacggatgaatatgttgcacgcacaaacatatattatcatgcaggaacatccagactacttgcagttggacatccctattttcctattaaaaaacctaacaataacaaaatattagttcctaaagtatcaggattacaatacagggtatttagaatacatttacctgaccccaataagtttggttttcctgacacctcattttataatccagatacacagcggctggtttgggcctgtgtaggtgttgaggtaggtcgtggtcagccattaggtgtgggcattagtggccatcctttattaaataaattggatgacacagaaaatgctagtgcttatgcagcaaatgcaggtgtggataatagagaatgtatatctatggattacaaacaaacacaattgtgtttaattggttgcaaaccacctataggggaacactggggcaaaggatccccatgtaccaatgttgcagtaactccaggtgattgtccaccattagagttaataaacacagttattcaggatggtgatatggttgatactggctttggtgctatggactttactacattacaggctaacaaaagtgaagttccactggatatttgtacatctatttgcaaatatccagattatattaaaatggtgtcagaaccatatggcgacagcttatttttttatttacgaagggaacaaatgtttgttaggcatttatttaatagggctggtgctgttggtgaaaatgtaccagacgatttatacattaaaggctctgggtctactgcaaatttagccagttcaaattattttcctacacctagtggttctatggttacctctgatgcccaaatattcaataaaccttattggttacaacgagcacagggccacaataatggcatttgttggggtaaccaactatttgttactgttgttgatactacacgcagtacaaatatgtcattatgtgctgccatatctacttcagaaactacatataaaaatactaactttaaggagtacctacgacatggggaggaatatgatttacagtttatttttcaactgtgcaaaataaccttaactgcagacgttatgacatacatacattctatgaattccactattttggaggactggaattttggtctacaacctcccccaggaggcacactagaagatacttataggtttgtaacatcccaggcaattgcttgtcaaaaacatacacctccagcacctaaagaagatccccttaaaaaatacactttttgggaagtaaatttaaaggaaaagttttctgcagacctagatcagtttcctttaggacgcaaatttttactacaagcaggattaaaggccaaaccaaaatttacattaggaaaacgaaaagctacacccaccacctcatctacctctacaactgctaaacgcaaaaaacgtaagctgtaagtattgtatgtatgttgactcagtgttgtttgttgtttatatgtctgtatgtgcttgtatgtgcttgtaaatattaagttgtatgtgtgtttgtatgtatggtataataaacatgtgtgtatgtgttttttactgcttgtgtaactattgtgtcatgcaacataaataaacttattgtttcaacacctactaattgtgttgtggttattcattgtatataaactatatttgctacatcctgtttttgttttatatatactatattttgtagcgccagcggccattttgtagcttcaaccgaattcggttgcatgctttttggcacaaaatgtgtttttttaaatagttctatgtcagcaactatagtttaaacttgtacgtttcctgcttgccatgcgtgccaaatccctgttttcctgacctgcactgcttgccaaccattccattgttttttacactgcactatgtgcaactactgaatcactatgtacattgtgtcatataaaataaatcactatgcgccaacgccttacataccgctgttaggcacatatttttggcttgttttaactaccctaattgcatatttggcataaggtttaaacttctaaggccaactaaatgccaccctagttcatacatgaactgtgtaaaggttagtcatacattgttcatttgtaaaactacacatgggtgtgtgcaaaccgttttgggttacacatttacaagcaacttatataataatactaaactacaataattcatgtataaaattaagggcgtaaccgaaatcggttgaaccgaaaccggttagtataaaagcagacattttatgcaccaaaagagaactgcaatgtttcaggacccacaggagcgacccagaaagttaccacagttatgcacagagctgcaaacaactatacatgagataatattagaatgtgtgtactgcaagcaacagttactgcgacgtgaggtatatgactttgcttttcgggatttatgcatagtatatagagatgggaatccatatgctgtatgtgataaatgtttaaagttttattctaaaattagtgagtatagacattattgttatagtttgtatggaacaacattagaacagcaatacaacaaaccgttgtgtgatttgttaattaggtgtattaactgtcaaaagccactgtgtcctgacgaaaagcaaagacatctggacaaaaagcaaagattccataatataaggggtcggtggaccggtcgatgtatgtcttgttgcagatcatcaagaacacgtagagaaacccagctgtaatcatgcatggagatacacctacattgcatgaatatatgttagatttgcaaccagagacaactgatctctactgttatgagcaattaagtgacagctcagaggaagaggatgaaatagatggtccagctggacaagcagaaccggacagagcccattacaatattgtaaccttttgttgcaagtgtgactctacgcttcggttgtgcgtacaaagcacacacgtagacattcgtactttggaagacctgttaatgggcacactaggaattgtgtgccccatctgttcccagaaaccataatctacc

SEQ ID NO: 42 - DNA, 7906 bp, Homo sapiens
  source 1..7906: mol_type = genomic DNA; note = UNCseq1991
atggctgatcctgcaggtaccaatggggaagagggtacgggatgtaatggatggttttatgtagaggctgtagtggaaaaaaaaacaggggatgctatatcagatgacgagaacgaaaatgacagtgatacaggtgaagatttggtagattttatagtaaatgataatgattatttgacacaggcagaaacagagacagcacatgcgttgtttactgcacaggaagcaaaagaacatagagatgcagtacaggttctaaaacgaaagtatttgggtagtccacttagtgatattagtgaatgtgtagacaataatattagtcctagattaaaagccatatgtatagaaaaacaaagtagagctgcaaaaaggagattatttgaaagcgaagacagcgggtatggcaatactgaagtggaaactcagcagatgttacaggtagaagggcgccatgagactgaaacaccatgtagtcagtatagtggtggaagtgggggtggtagcagtcagtatagtagtggaagtgggggagagggtgttagtgaaagacacactatatgcgaaacaccacttacaaatattttaaatgtactaaaaactagtaatgcaaaggcagcaatgctagcaaaatttaaagagttatacggggtgagttttacagaattagtaagaccatttaaaagtaataaatcaacgtgttgcgattggtgtattgctgcatttggacttacacccagtatagctgacagtataaaaacattattacaacaatattgtttatatttacacattcaaagtttagcgtgttcatggggaatggttgtgttactattagtaagatataaatgtggaaaaaatagagaaacaattgaaaaattgatgtctaaactattatgtgtgtctccaatgtgtatgatgatagagcctccaaaattgcgtagtacagcagcagcattatattggtataaaacaggtatgtcaaatattagtgaagtgtatggagacacgccagaatggatacaaagacaaacagtattacaacatagttttaatgattgtacatttgaattatcacagatggtacaatgggcctacgataatgacatagtagacgatagtgaaattgcatataaatatgcacaattggcagacactaatagtaatgcaagtgcctttttaaaaagtaattcacaggcaaaaattgtaaaggattgtgcaacaatgtgtagacattataaacgagcagaaaaaaaacaaatgagtatgagtcaatggataaaatatagatgtgatagggtagatgatggaggtgattggaagcaaattgttatgtttctaaggtatcaaggtgtagactttatgtcatttttaagtgcattaaaaaaatttctgcaaggtatacctaaaaaaaattgcatattattatatggtgcagctaacacaggtaaatcattatttggtatgagtttaatgaaattcttgcaagggtctgtaatatgttttgtaaattctaaaagccatttttggttacaaccattagcagatgccaaaataggtatgttagatgatgctacagtgccctgttggaactacatagatgacaatttaagaaatgcattggatggaaatttagtttctatggatgtaaagcatagaccattggtacaactaaaatgccctccattattaattacatctaacattaatgctggtacagattccaggtggccttatttacataatcgattggtggtgtttacatttccaaatgagtttccatttgacaaaaacggaaatccagtgtatgagcttaatgataagaactggaaatcctttttctcaaggacgtggtccagattaagtttgcacgaggacgaggacaaggaaaacgatggagactctttgccaacgtttaaatgtgtgtcaggacaaaatactaacacattatgaaaatgatagtacagacctacgtgaccatatagactattggaaacaaatgcgcctagaatgtgctatttattacaaggccagagaaatgggatttaaacatattaaccaccaggtggtgccaacactggctgtatcaaagaataaagcattacaagcaattgaactgcaactaacgttagaaacaatatataactcacaatatagtaatgaaaagtggacattacaagacgttagccttgaagtgtatttaactgcaccaacaggatgtataaaaaaacatggatatacagtggaagtgcagtttgatggagacatatgcaatacaatgcattatacaaactggaaacatatatatatttgtgaagacacatcagtaactgtggtagagggtcaagttgactattatggtatatattatgttcatgaaggaatacaaacatattttgtgcagtttaaagatgatgcagaaaaatatagtaaaaataaagtatgggaagttcatgcgggtggtcaggtaatattatgtcctacatctgtgtttagcagcgacgaagtatcctctgctgaaattactaggcagcacttggccaaccactccgccgcgacccataccaaagccgtcgccttgggcaccaaagaaacacagacgactatccagcgaccaagatcagagccagacaccggaaacccctgccacaccaacaagttgttgcacagagactccgtggacagtgctccaatcctcactgcagttaacagctcacacaaaggacggattaactgtaatagtaacactacacccatagtacatttaaaaggtgatgctaatactttaaaatgtttaagatacagatttaaaaagcattgtaaattgtatacagcagtgtcgtccacatggcattggacaggacataatgtaaaacataaaagtgcaattgttacacttacatatgatagtgaatgtcaacgtgaacaatttttgtctcaagtgaaaataccaaaaactattacagtgtctactggatttatgtctatatgacaaaccttgatactgcatccacaacattactggcgtgctttttgctttgcttttgtgtgcttttgtgtgtctgcctattaatacgtccgctgcttttgtctgtgtctacatacacatcattaatactattggtattagtattgtggataacagcagcctctgcatttaggtgttttattgtatatattatatttgtttatataccattatttttaatacatacacatgcacgctttttaattacataatgtatatgtacataatgtaattgttacatataattgttgtataccataaattactattttttcttttttattttcatatataatttttttttttgtttgtttgtttgttttttaataaactgttattacttaacaatgcgacacaaacgttctgcaaaacgcacaaaacgtgcatcggctacccaactttataaaacatgcaaacaggcaggtacatgtccacctgacattatacctaaggttgaaggcaaaactattgctgatcaaatattacaatatggaagtatgggtgtattttttggtgggttaggaattggaacagggtctggtacaggcggacgcactgggtacattccattaggaacaaggcctcccactgctacagatacacttgctcctgtaagaccccctttaacagtagatcctgtgggcccttctgatccttctatagtttctttagtggaagaaactagttttattgatgctggtgcaccaacccctgtaccttccattcccccagatgtatcaggatttagtattacaacttcaactgataccacacctgctatattagatattaataatactgttactactgttactacacataataatcccacttttactgacccatctgtattgcagcctccaacacctgcagaaactggagggcattttacactttcatcatccactattagtacacataattatgaagaaattcctatggatacatttattgttagcacaaaccctaacacagtaactagtagcacacccataccggggtctcgcccagtggcacgcctaggattatatagtcgcacaacacaacaagttaaggttgtggaccctgcttttgtaaccgctcccactaaacttattacatatgataatcctgcatatgaaggtatagatgtggataatacattttatttttctagtaatgataatagtattaatatagctccagatcctgactttttggatatagttgctttacataggccagcattaacctctaggcgtactggcattagatacagtagaattggtaataaacaaacactacgtactcgtagtggaaaatctataggtgctaaggtacattattattatgatttaagtactattaatcctgcagaagaaatagaattacaaactataacaccttctacatatacaaccacttcccatgcagcctcaccaacttctattaataatggattatatgatatttatgcagatgactttattacagatactgttacaaccccagtaccagctataccctctacatccttatcaggttatattcctgcaaatacaacaattccttttggtggtgcatacaatattcctttagtatcaggacctgatatacctattaatacaactgaccaaactccttcattaattcctatagttccagggtctccacaatatacaattattgctgatggaggtgacttttatttacatcctagttattacatgttacgaaaacgacgtaaacgtttaccatattttttttcagatgtctctttggctgcctagtgaggccactgtctacttgcctcctgtcccagtatctaaagttgtaagcacggatgaatatgttgcacgcacaaacatatattatcatgcaggaacatccagactacttgcagttggacatccctattttcctattaaaaaacctaacaataacaaaatattagttcctaaagtatcaggattacaatacagggtatttagaatatatttacctgaccccaataagtttggttttcctgacacctcattttacaatccagatacacagcggctggtttgggcctgtgtaggtgttgaggtaggtcgtggtcagccattaggtgtgggcattagtggccatcctttattaaataaattggatgacacagaaaatgctagtgcttatgcagcaaatgcaggtgtggataatagagaatgtatatctatggattacaaacaaacacaattgtgtttaattggttgcaaaccacctataggggaacactggggcaaaggatccccatgtaacaatgttgcagtaactccaggtgattgtccaccattagagttaataaacacagttattcaggatggtgatatggttgataccggctttggtgctatggactttactacattacaggctaacaaaagtgaagttccactggatatttgtacatctatttgcaaatatccagattatattaaaatggtgtcagaaccatatggcgacagcttatttttttatttacgaagggaacaaatgtttgttagacatttatttaatagggctggtgctgttggtgaaaatgtaccagacgatttatacattaaaggctctgggtctactgcaaatttagccagttcaaattattttcctacacctagtggttctatggttacctctgatgcccaaatatttaataaaccttattggttacaacgagcacagggccacaataatggcatttgttggggtaaccaactatttgttactgttgttgatactacacgcagtacaaatatgtcattatgtgctgccatatctacttcagaacctacatataaaaatactaactttaaagagtacctacgacatggggaggaatatgatttacagtttatttttcaactgtgcaaaataaccttaactgcagacgttatgtcatacatacattctatgaattccactattttggaggactggaattttggtttacaacctcctccaggaggcacactagaagatacttataggtttgtaacatcccaggcaattgcttgtcaaaaacatacacctccagcacctaaagaagatccccttaaaaaatatactttttgggaagtaaatttaaaagaaaagttttctgcagacctagatcagtttcctttaggacgcaaatttttactacaagcaggatttaaggccaaaccaaaatttacattaggaaaacgaaaagctacacccaccacctcatctacctctacaactgctaaacgcaaaaaacgtaagctgtaagtattgtatgtatgttgaattagtgttgtttgttgtttatatgtttgtatgtgcttgtatgtgcttgtaaatattacgttgtatgtgtgtttgtatgtatggtataataaacacgtgtgtatgtgtttttaaatgcttgtgtaactattgtgtcatgcaacataaataaacttattgtttcatcacctactaattgtgttgtggttattcattgtatataaactatatttgctacattttgtttttgttttatatatactatattttgtagcgccagcggccattttgtagcttcaaccgaattcggttgcatgctttttggcacaaactgtatttttttaaatagttctatgtcagcaactatagtttaaacttgtacgtttcctgcttgccatgcgtgccaaatccctgttttcctgacctgcactgcttgccaaccattccattgttttttacactgcactatgtgcaactactgaatcactatgtacattgtgtcatataaaataaattactatgcgccaacgccttaaataccgctgttaggcacatatttttggcttgttttaactcacctaattgcatagttggcataaggtttaaacttttaaggccaactaaatgtcaccttagttcatacatgaactgtgtaaaggttagtcatacattgttcatttgtaaaactgcacatgggtgtgtgcaaaccgttttgggttacacatttacaaggaacttatataataatactaaactacaataattcatgtataaaactaagggcgtaaccgaaatcggttgaaccgaaaccggttagtataaaagcagacattttatgcaccaaaagagaactgcaatgtttcaggacccacaggagcgacccagaaagttaccacatttatgcacagagctgcaaacaactatacatgatataatattagaatgtgtgtactgcaagcaacagttactgcgacgtgaggtatatgactttgcttttcgggatttatgcatagtatatagagatgggaatccatatgcagtgtgtgataaatgtttaaagttttattctaaaattagtgagtatagatattattgttatagtgtgtatggaacaacattagaacagcaatacaacaaactgttgtgtgatttgttaattaggtgtattaactgtcaaaagccactgtgtcctgaagaaaagcaaagacatctggacaaaaagcaaagattccataatataaggggtcggtggaccggtcgatgtatgtcttgttgcagatcatcgagaacacgtagagaaacccagctgtaatcatgcatggagatacacctacattgcatgaatatatgttagatttgcaaccagagacaactgatctctactgttatgagcaattaaatgacagctcagaggaggaggatgaaatagatggtccagctggacaagcagaaccggacagagcccattacaatattgtaaccttctgttgcaagtgtgactctacgcttcggttgtgcgtacaaagcacacacgtagacatccgtacgttggaagacctgttaatgggcacactaggaattgtgtgccccatctgttctcagaaaccataatctacc

SEQ ID NO: 43 - DNA, 7906 bp, Homo sapiens
  source 1..7906: mol_type = genomic DNA; note = UNCseq1994
atggctgatcctgcaggtaccaatggggaagagggtacgggatgtaatggatggttttatgtagaggctgtagtggaaaaaaaaacaggggatgctatatcagatgacgagaacgaaaatgacagtgatacaggtgaagatttggtagattttatagtaaatgataatgattatttaacacaggcagaaacagagacagcacatgcgttgtttactgcacaggaagcaaaacaacatagagatgcagtacaggttctaaaacgaaagtatttgggtagtccacttagtgatattagtggatgtgtagacaataatattagtcctagattaaaagctatatgtatagaaaaacaaagtagagctgcaaaaaggagattatttgaaagcgaagacagcgggtatggcaatactgaagtggaaactcagcagatgttacaggtagaagggcgccatgagactgaaacaccatgtagtcagtatagtggtggaagtgggggtggttgcagtcagtacagtagtggaagtgggggagagggtgttagtgaaagacacactatatgccaaacaccacttacaaatattttaaatgtactaaaaactagtaatgcaaaggcagcaatgttagcaaaatttaaagagttatacggggtgagttttacagaattagtaagaccatttaaaagtaataaatcaacgtgttgcgattggtgtattgctgcatttggacttacacccagtatagctgacagtataaaaacactattacaacaatattgtttatatttacacattcaaagtttagcatgttcatggggaatggttgtgttactattagtaagatataaatgtggaaaaaatagagaaacaattgaaaaattgctgtctaaactattatgtgtgtctccaatgtgtatgatgatagagcctccaaaattgcgtagtacagcagcagcattatattggtataaaacaggtatatcaaatattagtgaagtgtatggagacacgccagaatggatacaaagacaaacagtattacaacatagttttaatgattgtacatttgaattatcacagatggtacaatgggcctacgataatgacatagtagacgatagtgaaattgcatataaatatgcacaattggcagacactaatagtaatgcaagtgcctttctaaaaagtaattcacaggcaaaaattgtaaaggattgtgcaacaatgtgtagacattataaacgagcagaaaaaaaacaaatgagtatgagtcaatggataaaatatagatgtgatagggtagatgatggaggtgattggaagcaaattgttatgtttttaaggtatcaaggtgtagagtttatgtcatttttaactgcattaaaaagatttttgcaaggcatacctaaaaaaaattgcatattactatatggtgcagctaacacaggtaaatcattatttggtatgagtttaatgaaatttctgcaagggtctgtaatatgttttgtaaattctaaaagccatttttggttacaaccattagcagatgccaaaataggtatgttagatgatgctacagtgccctgttggaactatatagatgacaatttaagaaatgcattggatggaaatttagtttctatggatgtaaagcatagaccattggtacaactaaaatgccctccattattaattacatctaacattaatgctggtacagattctaggtggccttatttacataatagattggtggtgtttacatttcctaatgagtttccatttgacgaaaacggaaatccagtgtatgagcttaatgataagaactggaaatcctttttctcaaggacgtggtccagattaagtttgcacgaggacgaggacaaggaaaacgatggagactctttgccaacgtttaaatgtgtgtcaggacaaaatactaacacattatgaaaatgatagtacagacctacgtgaccatatagactattggaaacacatgcgcctagaatgtgctatttattacaaggccagagaaatgggatttaaacatattaaccaccaggtggtgccaacactggctgtatcaaagaataaagcattacaagcaattgaactgcaactaacgttagaaacaatatataactcacaatatagtaatgaaaagtggacattacaagacgttagccttgaagtgtatttaactgcaccaacaggatgtataaaaaaacatggatatacagtggaagtgcagtttgatggagacatatgcaatacaatgcattatacaaactggacacatatatatatttgtgaagaagcatcagtaactgtggtagagggtcaagttgactattatggtttatattatgttcatgaaggaatacgaacatattttgtgcagtttaaagatgatgcagaaaaatatagtaaaaataaagtatgggaagttcatgcgggtggtcaggtaatattatgtcctacatctgtgtttagcagcaacgaagtatcctctcctgaaattattaggcagcacttggccaaccactccgccgcgacccataccaaagccgtcgccttgggcaccgaagaaacacagacgactatccagcgaccaagatcagagccagacaccggaaacccctgccacaccactaagttgttgcacagagactcagtggacagtgctccaatcctcactgcatttaacagctcacacaaaggacggattaactgtaatagtaacactacacccatagtacatttaaaaggtgatgctaatactttaaaatgtttaagatatagatttaaaaagcattgtaaattgtatactgcagtgtcgtctacatggcattggacaggacataatgtaaaacataaaagtgcaattgttacacttacatatgatagtgaatggcaacgtgaccaatttttgtctcaagttaaaataccaaaaactattacagtgtctactggatttatgtctatatgacaaatcttgatactgcatccacaacattactggcgtgctttttgctttgcttttgtgtgcttttgtgtgtctgcctattaatacgtccgctgcttttgtctgtgtctacatacacatcattaatactattggtattactattgtggataacagcagcctctgcgtttaggtgttttattgtatatattgtatttgtttatataccattatttttaatacatacacatgcacgctttttaattacataatgtatatgtacataatgtaattgttacatataattgttgtataccataacttactattttttcttttttatttttatatataatttttttttttgtttgtttgtttgttttttaataaactgttatcacttaacaatgcgacacaaacgttctgcaaaacgcacaaaacgtgcatcggctacccaactttataaaacatgcaaacaggcaggtacatgtccacctgacattatacctaaggttgaaggcaaaactattgctgatcaaatattacaatatggaagtatgggtgtattttttggtgggttaggaattggaacagggtcgggtacaggcggacgcactgggtatattccattaggaacaaggcctcccacagctacagatacacttgctcctgtaagaccccctttaacagtagatcctgtgggcccttctgatccttctatagtttctttagtggaagaaactagttttattgatgctggtgcaccaacatccgtaccttccattcccccagatgtatcaggatttagtattactacttcaactgataccacacctgctatattagatattaataatactgttactactgttactacacataataatcccactttcactgacccatctgtattgcagcctccaacacctgcagaaactggagggcattttacactttcatcatccactattagtacacataattatgaagaaattcctatggatacatttattgttagcacaaaccctaacacagtaactagtagcacacccataccagggtctcgcccagtggcacgcctaggattatatagtcgcacaacacaacaagttaaagttgtagaccctgcttttgtaaccactcccactaaacttattacatatgataatcctgcatatgaaggtatagatgtggataatacattatattttcctagtaatgataatagtattaatatagctccagatcctgactttttggatatagttgctttacataggccagcattaacctctaggcgtactggcattaggtacagtagaattggtaataaacaaacactacgtactcgtagtggaaaatctataggtgctaaggtacattattattatgatttcagtactattgatcctgcagaagaaatagaattacaaactataacaccttctacatatactaccacttcacatgcagcctcacctacttctattaataatggattatatgatatttatgcagatgactttattacagatacttctacaaccccggtaccatctgtaccctctacatctttatcaggttatattcctgcaaatacaacaattccttttggtggtgcatacaatattcctttaatatcaggtcctgatatacccattaatataactgaccaagctccttcattaattcctatagttccagggtctccacaatatacaattattgctgatgcaggtgacttttatttacatcctagttattacatgttacgaaaacgacgtaaacgtttaccatattttttttcagatgtctctttggctgcctagtgaggccactgtctacttgcctcctgtcccagtatctaaggttgtaagcacggatgaatatgttgcacgcacaaacatatattatcatgcaggaacatccagactacttgcagttggacatccctattttcctattaaaaaacctaacaataacaaaatattagttcctaaagtatcaggattacaatacagggtatttagaatacatttacctgaccccaataagtttggttttcctgacacctcattttataatccagatacacagcggctggtttgggcctgtgtaggtgttgaggtaggtcgtggtcagccattaggtgtgggcattagtggccatcctttattaaataaattggatgacacagaaaatgctagtgcttatgcagcaaatgcaggtgtggataatagagaatgtatatctatggattacaaacaaacacaattgtgtttaattggttgcaaaccacctataggggaacactggggcaaaggatccccatgtaccaatgttgcagtaaatccaggtgattgtccaccattagagttaataaacacagttattcaggatggtgatatggttgatactggctttggtgctatggactttactacattacaggctaacaaaagtgaagttccactggatatttgtacatctatttgcaaatatccagattatattaaaatggtgtcagaaccatatggcgacagcttatttttttatttacggagggaacaaatgtttgttagacatttatttaatagggctggtgctgttggtgaaaatgtaccagacgatttatacattaaaggctctgggtctactgcaaatttagccagttcaaattattttcctacacctagtggttctatggttacctctgatgcccaaatattcaataaaccttattggttacaacgagcacagggccacaataatggcatttgttggggtaaccaactatttgttactgttgttgatactacacgcagtacaaatatgtcattatgtgctgccatatctacttcagaaactacatataaaaatactaactttaaggagtacctacgacatggggaggaatatgatttacagtttatttttcaactgtgcaaaataaccttaactgcagacgttatgacatacatacattctatgaattccactattttggaggactggaattttggtctacaacctcccccaggaggcacactagaagatacttataggtttgtaacatcccaggcaattgcttgtcaaaaacatacacctccagcacctaaagaagatccccttaaaaaatacactttttgggaagtaaatttaaaggaaaagttttctgcagacctagatcagtttcctttaggacgcaaatttttactacaagcaggattgaaggccaaaccaaaatttacattaggaaaacgaaaagctacacccaccacctcatctacctctacaactgctaaacgcaaaaaacgtaagctgtaagtattgtatgtatgttgaattagtgttgtttgttgtttatatgtttgtatgtgcttgtatgtgcttgtaaatattaagttgtatgtgtgtttgtatgtatggtataataaacacgtgtgtatgtgtttttaaatgcttgtgtaactattgtgtcatgcaacataaataaacttattgtttcaacacctactaattgtgttgtggttattcattgtatataaactatatttgctacatcctgtttttgttttatatatactatattttgtagcgccagcggccattttgtagcttcaaccgaattcggttgcatgctttttggcacaaaatgtgttttttcaaatagttctatgtcagcaactatagtttaaacttgtacgtttcctgcttgccatgcgtgccaaatccctgttttcctgacctgcactgcttgccaaccattccattgttttttacactgcactatgtgcaactactgaatcactatgtacattgtgtcatataaaataaatcactatgcgccaacgccttacataccgctgttaggcacatatttttggcttgttttaactaacctaattgcatatttggcataaggtttaaacttctaaggccaactaaatgtcaccctagttcatacatgaactgtgtaaaggttagtcatacattgttcatttgtaaaactgcacatgggtgtgtgcaaaccgttttgggttacacatttacaagcaacttatataataatactaaactacaataattcatgtataaaactaagggcgtaaccgaaatcggttgaaccgaaaccggttagtataaaagcagacattttatgcaccaaaagagaactgcaatgtttcaggacccacaggagcgacccagaaagttaccacagttatgcacagagctgcaaacaactatacatgatataatattagaatgtgtgtactgcaagcaacagttactgcgacgtgaggtatatgactttgcttttcgggatttatgcatagtatatagagatgggaatccatatgctgtatgtgataaatgtttaaagttttattctaaaattagtgagtatagacattattgttatagtttgtatggaacaacattagaacagcaatacaacaaaccgttgtgtgatttgttaattaggtgtattaactgtcaaaagccactgtgtcctgaagaaaagcaaagacatctggacaaaaagcaaagattccataatataaggggtcggtggaccggtcgatgtatgtcttgttgcagatcatcaagaacacgtagagaaacccagctgtaatcatgcatggagatacacctacattgcatgaatatatgttagatttgcaaccagagacaactgatctctactgttatgagcaattaaatgacagctcagaggaggaggatgaaatagatggtccagctggacaagcagaaccggacagagcccattacaatattgtaaccttttgttgcaagtgtgactctacgcttcggttgtgcgtacaaagcacacacgtagacattcgtactttggaagacctgttaatgggcacactgggaattgtgtgccccatctgttctcagaaaccataatctacc

SEQ ID NO: 44 - DNA, 7906 bp, Homo sapiens
  source 1..7906: mol_type = genomic DNA; note = UNCseq2000
atggctgatcctgcaggtaccaatggggaagagggtacgggatgtaatggatggttttatgtagaggctgtagtggaaaaaaaaacaggggatgctatatcagatgacgagaacgaaaatgacagtgatacaggtgaagatttggtagattttatagtaaatgataatgattatttaacacaggcagaaacagagacagcacatgcgttgtttactgcacaggaagcaaaacaacatagagatgcagtacaggttctaaaacgaaagtatttgggtagtccacttagtgatattagtggatgtgtagacaataatattagtcctagattaaaagctatatgtatagaaaaacaaagtagagctgcaaaaaggagattatttgaaagcgaagacagcgggtatggcaatactgaagtggaaactcagcagatgttacaggtagaagggcgccatgagactgaaacaccatgtagtcagtatagtggtggaagtgggggtggttgcagtcagtacagtagtggaagtgggggagagggtgttagtgaaagacacactatatgccaaacaccacttacaaatattttaaatgtactaaaaactagtaatgcaaaggcagcaatgttagcaaaatttaaagagttatacggggtgagttttacagaattagtaagaccatttaaaagtaataaatcaacgtgttgcgattggtgtattgctgcatttggacttacacccagtatagctgacagtataaaaacactattacaacaatattgtttatatttacacattcaaagtttagcatgttcatggggaatggttgtgttactattagtaagatataaatgtggaaaaaatagagaaacaattgaaaaattgctgtctaaactattatgtgtgtctccaatgtgtatgatgatagagcctccaaaattgcgtagtacagcagcagcattatattggtataaaacaggtatatcaaatattagtgaagtgtatggagacacgccagaatggatacaaagacaaacagtattacaacatagttttaatgattgtacatttgaattatcacagatggtacaatgggcctacgataatgacatagtagacgatagtgaaattgcatataaatatgcacaattggcagacactaatagtaatgcaagtgcctttctaaaaagtaattcacaggcaaaaattgtaaaggattgtgcaacaatgtgtagacattataaacgagcagaaaaaaaacaaatgagtatgagtcaatggataaaatatagatgtgatagggtagatgatggaggtgattggaagcaaattgttatgtttttaaggtatcaaggtgtagagtttatgtcatttttaactgcattaaaaagatttttgcaaggcatacctaaaaaaaattgcatattactatatggtgcagctaacacaggtaaatcattatttggtatgagtttaatgaaatttctgcaagggtctgtaatatgttttgtaaattctaaaagccatttttggttacaaccattagcagatgccaaaataggtatgttagatgatgctacagtgccctgttggaactatatagatgacaatttaagaaatgcattggatggaaatttagtttctatggatgtaaagcatagaccattggtacaactaaaatgccctccattattaattacatctaacattaatgctggtacagattctaggtggccttatttacataatagattggtggtgtttacatttcctaatgagtttccatttgacgaaaacggaaatccagtgtatgagcttaatgataagaactggaaatcctttttctcaaggacgtggtccagattaagtttgcacgaggacgaggacaaggaaaacgatggagactctttgccaacgtttaaatgtgtgtcaggacaaaatactaacacattatgaaaatgatagtacagacctacgtgaccatatagactattggaaacacatgcgcctagaatgtgctatttattacaaggccagagaaatgggatttaaacatattaaccaccaggtggtgccaacactggctgtatcaaagaataaagcattacaagcaattgaactgcaactaacgttagaaacaatatataactcacaatatagtaatgaaaagtggacattacaagacgttagccttgaagtgtatttaactgcaccaacaggatgtataaaaaaacatggatatacagtggaagtgcagtttgatggagacatatgcaatacaatgcattatacaaactggacacatatatatatttgtgaagaagcatcagtaactgtggtagagggtcaagttgactattatggtttatattatgttcatgaaggaatacgaacatattttgtgcagtttaaagatgatgcagaaaaatatagtaaaaataaagtatgggaagttcatgcgggtggtcaggtaatattatgtcctacatctgtgtttagcagcaacgaagtatcctctcctgaaattattaggcagcacttggccaaccaccccgccgcgacccataccaaagccgtcgccttgggcaccgaagaaacacagacgactatccagcgaccaagatcagagccagacaccggaaacccctgccacaccactaagttgttgcacagagactcagtggacagtgctccaatcctcactgcatttaacagctcacacaaaggacggattaactgtaatagtaacactacacccatagtacatttaaaaggtgatgctaatactttaaaatgtttaagatatagatttaaaaagcattgtacattgtatactgcagtgtcgtctacatggcattggacaggacataatgtaaaacataaaagtgcaattgttacacttacatatgatagtgaatggcaacgtgaccaatttttgtctcaagttaaaataccaaaaactattacagtgtctactggatttatgtctatatgacaaatcttgatactgcatccacaacattactggcgtgctttttgctttgcttttgtgtgcttttgtgtgtctgcctattaatacgtccgctgcttttgtctgtgtctacatacacatcattaataatattggtattactattgtggataacagcagcctctgcgtttaggtgttttattgtatatattatatttgtttatataccattatttttaatacatacacatgcacgctttttaattacataatgtatatgtacataatgtaattgttacatataattgttgtataccataacttactattttttcttttttattttcatatataatttttttttttgtttgtttgtttgttttttaataaactgttattacttaacaatgcgacacaaacgttctgcaaaacgcacaaaacgtgcatcggctacccaactttataaaacatgcaaacaggcaggtacatgtccacctgacattatacctaaggttgaaggcaaaactattgctgatcaaatattacaatatggaagtatgggtgtattttttggtgggttaggaattggaacagggtcgggtacaggcggacgcactgggtatattccattgggaacaaggcctcccacagctacagatacacttgctcctgtaagaccccctttaacagtagatcctgtgggcccttctgatccttctatagtttctttagtggaagaaactagttttattgatgctggtgcaccaacatctgtaccttccattcccccagatgtatcaggatttagtattactacttcaactgataccacacctgctatattagatattaataatactgttactactgttactacacataataatcccactttcactgacccatctgtattgcagcctccaacacctgcagaaactggagggcattttacactttcatcatccactattagtacacataattatgaagaaattcctatggatacatttattgttagcacaaaccctaacacagtaactagtagcacacccataccagggtctcgcccagtggcacgcctaggattatatagtcgcacaacacaacaggttaaagttgtagaccctgcttttgtaaccactcccactaaacttattacatatgataatcctgcatatgaaggtatagatgtggataatacattatatttttctagtaatgataatagtattaatatagctccagatcctgactttttggatatagttgctttacataggccagcattaacctctaggcgtactggcattaggtacagtagaattggtaataaacaaacactacgtactcgtagtggaaaatctataggtgctaaggtacattattattatgatttaagtactattgatcctgcagaagaaatagaattacaaactataacaccttctacatatactaccacttcacatgcagcctcacctacttctattaataatggattatatgatatttatgcagatgactttattacagatacttctacaaccccggtaccatctgtaccctctacatctttatcaggttatattcctgcaaatacaacaattccttttggtggtgcatacaatattcctttagtatcaggtcctgatatacccattaatataactgaccaagctccttcattaattcctatagttccagggtctccacaatatacaattattgctgatgcaggtgacttttatttacatcctagttattacatgttacgaaaacgacgtaaacgtttaccatattttttttcagatgtctctttggctgcctagtgaggccactgtctacttgcctcctgtcccagtatctaaggttgtaagcacggatgaatatgttgcacgcacaaacatatattatcatgcaggaacatccagactacttgcagttggacatccctattttcctattaaaaaacctaacaataacaaaatattagttcctaaagtatcaggattacaatacagggtatttagaatacatttacctgaccccaataagtttggttttcctgacacctcattttataatccagatacacagcggctggtttgggcctgtgtaggtgttgaggtaggtcgtggtcagccattaggtgtgggcattagtggccatcctttattaaataaattggatgacacagaaaatgctagtgcttatgcagcaaatgcaggtgtggataatagagaatgtatatctatggattacaaacaaacacaattgtgtttaattggttgcaaaccacctataggggaacactggggcaaaggatccccatgtaccaatgttgcagtaaatccaggtgattgtccaccattagagttaataaacacagttattcaggatggtgatatggttgatactggctttggtgctatggactttactacattacaggctaacaaaagtgaagttccactggatatttgtacatctatttgcaaatatccagattatattaaaatggtgtcagaaccatatggcgacagcttatttttttatttacgaagggaacaaatgtttgttagacatttatttaatagggctggtactgttggtgaaaatgtaccagacgatttatacattaaaggctctgggtctactgcaaatttagccagttcaaattattttcctacacctagtggttctatggttacctctgatgcccaaatattcaataaaccttattggttacaacgagcacagggccacaataatggcatttgttggggtaaccaactatttgttactgttgttgatactacacgcagtacaaatatgtcattatgtgctgccatatctacttcagaaactacatataaaaatactaactttaaggagtacctacgacatggggaggaatatgatttacagtttatttttcaactgtgcaaaataaccttaactgcagacgttatgacatacatacattctatgaattccactattttggaggactggaattttggtctacaaccccccccaggaggcacactagaagatacttataggtttgtaacatcccaggcaattgcttgtcaaaaacatacacctccagcacctaaagaagatccccttaaaaaatacactttttgggaagtaaatttaaaggaaaagttttctgcagacctagatcagtttcctttaggacgcaaatttttactacaagcaggattgaaggccaaaccaaaatttacattaggaaaacgaaaagctacacccaccacctcatctacctctacaactgctaaacgcaaaaaacgtaagctgtaagtattgtatgtatgttgaattagtgttgtttgttgtttatatgtttgtatgtgcttgtatgtgcttgtaaatattaagttgtatgtgtgtttgtatgtatggtataataaacacgtgtgtatgtgtttttaaatgcttgtgtaactattgtgtgatgcaacataaataaacttattgtttcaacacctactaattgtgttgtggttattcattgtatataaactatatttgctacatcctgtttttgttttatatatactatattttgtagcgccagcggccattttgtagcttcaaccgaattcggttgcatgctttttggcacaaaatgtgtttttttaaatagttctatgtcagcaactatagtttaaacttgtacgtttcctgcttgccatgcgtgccaaatccctgttttcctgacctgcactgcttgccaaccattccattgttttttacactgcactatgtgcaactactgaatcactatgtacattgtgtcatataaaataaatcactatgcgccaacgccttacataccgctgttaggcacatatttttggcttgttttaactaacctaattgcatatttggcataaggtttaaacttctaaggccaactaaatgtcaccctagttcatacatgaactgtgtaaaggttagtcatacattgttcatttgtaaaactgcacatgggtgtgtgcaaaccgttttgggttacacatttacaagcaacttatataataatactaaactacaataatccatgtataaaactaagggcgtaaccgaaatcggttgaaccgaaaccggttagtataaaagcagacattttatgcaccaaaagagaactgcaatgtttcaggacccacaggagcgacccggaaagttaccacagttatgcacagagctgcaaacaactatacatgatataatattagaatgtgtgtactgcaagcaacagttactgcgacgtgaggtatatgactttgcttttcgggatttatgcatagtatatagagatgggaatccatatgctgtatgtgataaatgtttaaagttttattctaaaattagtgagtatagacattattgttatagtgtgtatggaacaacattagaacagcaatacaacaaaccgttgtgtgatttgttaattaggtgtattaactgtcaaaagccactgtgtcctgaagaaaagcaaagacatctggacaaaaagcaaagattccataatataaggggtcggtggaccggtcgatgtatgtcttgttgcagatcatcaagaacacgtagagaaacccagctgtaatcatgcatggagatacacctacattgcatgaatatatgttagatttgcaaccagagacaactgatctctactgttatgagcaattaaatgacagctcagaggaggaggatgaaatagatggtccagctggacaagcagaaccggacagagcccattacaatattgtaaccttttgttgcaagtgtgactctacgcttcggttgtgcgtacaaagcacacacgtagacattcgtactttggaagacctgttaatgggcacactaggaattgtgtgccccatctgttctcagaaaccataatctacc

SEQ ID NO: 45 - DNA, 7906 bp, Homo sapiens
  source 1..7906: mol_type = genomic DNA; note = UNCseq2005
atggctgatcctgcaggtaccaatggggaagagggtacgggatgtaatggatggttttatgtagaggctgtagtggaaaaaaaaacaggggatgctatatcagatgacgagaacgaaaatgacagtgatacaggtgaagatttggtagattttatagtaaatgataatgattatttaacacaggcagaaacagagacagcacatgcgttgtttactgcacaggaagcaaaacaacatagagatgcagtacaggttctaaaacgaaagtatttgggtagtccacttagtgatattagtggatgtgtagacaataatattagtcctagattaaaaactatatgtatagaaaaacaaagtagagctgcaaaaaggagattatttgaaagcgaagacagcgggtatggcaatactgaagtggaaactcagcagatgttacaggtagaagggcgccatgagactgaaacaccatgtagtcagtatagtggtggaagtgggggtggttgcagtcagtacagtagtggaagtgggggagagggtgttagtgaaagacacactatatgccaaacaccacttacaaatattttaaatgtactaaaaactagtaatgcaaaggcagcaatgttagcaaaatttaaagagttatacggggtaagtttttcagaattagtaagaccatttaaaagtaataaatcaacgtgttgcgattggtgtattgctgcatttggacttacacccagtatagctgacagtataaaaacactattacaacaatattgtttatatttacacattcaaagtttagcatgttcatggggaatggttgtgttactattagtaagatataaatgtggaaaaaatagagaaacaattgaaaaattgctgtctaaactattatgtgtgtctccaatgtgtatgatgatagagcctccaaaattgcgtagtacagcagcagcattatattggtataaaacaggtatgtcaaatattagtgaagtgtatggagacacgccagaatggatacaaagacaaacagtattacaacatagttttaatgattgtacatttgaattatcacagatggtacaatgggcctacgataatgacatagtagacgatagtgaaattgcatataaatatgcacaattggcagacactaatagtaatgcaagtgcctttctaaaaagtaattcacaggcaaaaattgtaaaggattgtgcaacaatgtgtagacattataaacgagcagaaaaaaaacaaatgagtatgagtcaatggataaaatatagatgtgatagggtagatgatggaggtgattggaagcaaattgttatgtttttaaggtatcaaggtgtagagtttatgtcatttttaactgcattaaaaagatttttgcaaggcatacctaaaaaaaattgcatattactatatggtgcagctaacacaggtaaatcattatttggtatgagtttaataaaatttctgcaagggtctgtaatatgttttgtaaattctaaaagccatttttggttacaaccattagcagatgccaaaataggtatgttagatgatgctacagtgccctgttggaactacatagatgacaatttaagaaatgcattggatggaaatttagtttctatggatgtaaagcatagaccattggtacaactaaaatgccctccattattaattacatctaacattaatgctggtacagattctaggtggccttatttacataatagattggtggtgtttacatttcctaatgagtttccatttgacgaaaacggaaatccagtgtatgagcttaatgataagaactggaaatcctttttctcaaggacgtggtccagattaagtttgcacgaggacgaggacaaggaaaacgatggagactctttgccaacgtttaaatgtgtgtcaggacaaaatactaacacattatgaaaatgatagtacaaacctacgtgaccatatagactattggaaacacatgcgcctagaatgtgctatttattacaaggccagagaaatgggatttaaacatattaaccaccaggtggtgccaacactggctgtatcaaagaataaagcattacaagcaattgaactgcaactaacgttagaaacaatatataactcacaatatagtaatgaaaagtggacattacaagacgttagccttgaagtgtatttaactgcaccaacaggatgtataaaaaaacatggatatacagtggaagtgcagtttgatggagacatatgcaatacaatgcattatacaaactggaaacatatatatatttgtgaagaagcatcagtaactgtggtagagggtcaagttgactattatggtttatattatgttcatgaaggaatacaaacatattttgtgcagtttaaagatgatgcagaaaaatatagtaaaaataaagtatgggaagttcatgcgggtggtcaggtaatattatgtcctacatctgtgtttagcagcaacgaagtatcctctcctgaaactattaggcagcacttggccaaccactccgccgcgacccataccaaagccgtcgccttgggcaccgaagaaacacagacgactatccagcgaccaagatcagagccagacaccggaaacccctgccacaccactaagttgttgcacagagactcagtggacagtgctccaatcctcactgcatttaacagctcacacaaaggacggattaactgtaatagtaacactacacccatagtacatttaaaaggtgatgctaatactttaaaatgtttaagatatagatttaaaaagcattgtacattgtatactgcagtgtcgtctacatggcattggacaggacataatgtaaaacataaaagtgcaattgttacacttacatatgatagtgaatggcaacgtgaccaatttttgtctcaagttaaaataccaaaaactattacagtgtctactggatttatgtctatatgacaaatcttgatactgcatccacaacattactggcgtgctttttgctttgcttttgtgtgcttttgtgtgtctgcctattaatacgtccgctgcttttgtctgtgtctacatacacatcattaatactattggtattactattgtggataacagcagcctctgcgtttaggtgttttattgtatatattgtatttgtttatataccattatttttaatacatactcatgcacgctttttaattacataatgtatatgtacataatgtaattgttacatataattgttgtataccataacttactattttttcttttttatttttatatataatttttttttttgtttgtgtgtttgttttttaataaactgttatcacttaacaatgcgacacaaacgttctgcaaaacgcacaaaacgtgcatcggctacccaactttataaaacatgcaaacaggcaggtacatgtccacctgacattatacctaaggttgaaggcaaaactattgctgatcaaatattacaatatggaagtatgggtgtattttttggtgggttaggaattggaacagggtcgggtacaggcggacgcactgggtatattccattgggaacaaggcctcccacagctacagatacacttgctcctgtaagaccccctttaacagtagatcctgtgggcccttctgatccttctatagtttctttagtggaagaaactagttttattgatgctggtgcaccaacatctgtaccttccattcccccagatgtatcaggatttagtattactacttcaactgataccacacctgctatattagatattaataatactgttactactgttactacacataataatcccactttcactgacccatctgtattgcagcctccaacacctgcagaaactggagggcattttacactttcatcatccactattagtacacataattatgaagaaattcctatggatacatttattgttagcacaaaccctaacacagtaactagtagcacacccataccagggtctcgcccagtggcacgcctaggattatatagtcgcacaacacaacaagttaaagttgtagaccctgcttttgtaaccactcccactaaacttattacatatgataatcctgcatatgaaggtatagatgtggataatacattatattttcctaataatgataatagtattaatatagctccagatcctgactttttggatatagttgctttacataggccagcattaacctctaggcgtactggcattaggtacagtagaattggtaataaacaaacactacgtactcgtagtggaaaatctataggtgctaaggtacattattattatgatttcagtactattgatcctgcagaagaaatagaattacaaactataacaccttctacatatactaccacttcacatgcagcctcacctacttctattaataatggattatatgatatttatgcagatgactttattacagatacttttacaaccccggtaccatctgtaccctctacatctttatcaggttatattcctgcaaatacaacaattccttttggtggtgcatacaatattcctttagtatcaggtcctgatatacccattaatataactaaccaagctccttcattacttcctatagttccagggtctccacaatatacaattattgctgatgcaggtgacttttatttacatcctagttattacatgttacgaaaacgacgtaaacgtttaccatattttttttcagatgtctctttggctgcctagtgaggccactgtctacttgcctcctgtcccagtatctaaggttgtaagcacggatgaatatgttgcacgcacaaacatatattatcatgcaggaacatccagactacttgcagttggacatccctattttcctattaaaaaacctaacaataacaaaatagtagttcctaaagtatcaggattacaatacagggtatttagaatacatttacctgaccccaataagtttggttttcctgacacctcattttataatccagatacacagcggctggtttgggcctgtgtaggtgttgaggtaggtcgtggtcagccattaggtgtgggcattagtggccatcctttattaaataaattggatgacacagaaaatgctagtgcttatgcagcaaatgcaggtgtggataatagagaatgtatatctatggattacaaacaaacacaattgtgtttaattggttgcaaaccacctataggggaacactggggcaaaggatccccatgtaccaatgttgcagtaaatccaggtgattgtccaccattagagttaataaacacagttattcaggatggtgatatggttgatactggctttggtgctatggactttactacattacaggctaacaaaagtgaagttcccctggatatttgtacatctatttgcaaatatccagattatattaaaatggtgtcagaaccatatggcgacagcttatttttttatttacgaagggaacaaatgtttgttagacatttatttaatagggctggtgctgttggtgaaaatgtaccagacgatttatacattaaaggctctgggtctactgcaaatttagccagttcaaattattttcctacacctagtggttctatggttacctctgatgcccaaatattcaataaaccttattggttacaacgagcacagggccacaataatggcatttgttggggtaaccaactatttgttactgttgttgatactacacgcagtacaaatatgtcattatgtgctgccatatctacttcagaaactacatataaaaatactaactttaaggagtacctacgacatggggaggaatatgatttacagtttatttttcaactgtgcaaaataaccttaactgcagacgttatgacatacatacattctatgaattccactattttggaggactggaattttggtctacaacctcccccaggaggcacactagaagatacttataggtttgtaacatcccaggcaattgcttgtcaaaaacatacacctccagcacctaaagaagatccccttaaaaaatacactttttgggaagtaaatttaaaggaaaagttttctgcagacctagatcagtttcctttaggacgcaaatttttactacaagcaggattaaaggccaaaccaaaatttacattaggaaaacgaaaagctacacccaccacctcatctacctctacaactgctaaacgcaaaaaacgtaagctgtaagtattgtatgtatgttgaatcagtgttgtttgttgtgtatatgtctgtatgtgcttgtatgtgcttgtaaatattaagttgtatgtgtgtttgtatgtatggtataataaacacgtgtgtatgtgtttttcactgcttgtgtaactattgtgtcatgcaacataaataaacttattgtttcaacacctaccaattgtgttgtggttattcattgtatataaactatatttgctacatcctgtttttgttttatatatactatattttgtagcgccagcggccattttgtagcttcaaccgaattcggttgcatgctttttggcacaaaatgtgtttttttaaatagttctatgtcagcaactatagtttaaacttgtacgtttcctgcttgccatgcgtgccaaatccctgttttcctgacctgcactgcttgccaaccattccattgttttttacactgcactatgtgcaactactgaatcactatgtacattgtgtcatataaaataaatcactatgcgccaacgccttacataccgctgttaggcacatatttttggcttgttttaactaccctaattgcatatttggcataaggtttaaacttctaaggccaactaaatgccaccctagttcatacatgaactgtgtaaaggttagtcatacattgttcatttgtaaaactacacatgggtgtgtgcaaaccgttttgggttacacatttacaagcaacttatataataatactaaactacaataattcatgtataaaattaagggcgtaaccgaaatcggttgaaccgaaaccggttagtataaaagcagacattttatgcaccaaaagagaactgcaatgtttcaggacccacaggagcgacccagaaagttaccacagttatgcacagagctgcaaacaactatacatgagataatattagaatgtgtgtactgcaagcaacagttactgcgacgtgaggtatatgactttgcttttcgggatttatgcatagtatatagagatgggaatccatatgctgtatgtgataaatgtttaaagttttattctaaaattagtgagtatagacattattgttatagtttgtatggaacaacattagaacagcaatacaacaaaccgttgtgtgatttgttaattaggtgtattaactgtcaaaagccactgtgtcctgaagaaaagcaaagacatctggacaaaaagcaaagattccataatataaggggtcggtggaccggtcgatgtatgtcttgttgcagatcatcaagaacacgtagagaaacccagctgtaatcatgcatggagatacacctacattgcatgaatatatgttagatttgcaaccagagacaactgatctctactgttatgagcaattaaatgacagctcagaggaggaggatgaaatagatggtccagctggacaagcagaaccggacagagcccattacaatattgtaaccttttgttgcaagtgtgactctacgcttcggttgtgcgtacaaagcacacacgtagacattcgtactttggaagacctgttaatgggcacactaggaattgtgtgccccatctgttcccagaaaccataatctacc

SEQ ID NO: 46 - DNA, 7906 bp, Homo sapiens
  source 1..7906: mol_type = genomic DNA; note = UNCseq2007
atggctgatcctgcaggtaccaatggggaagagggtacgggatgtaatggatggttttatgtagaggctgtagtggaaaaaaaaacaggggatgctatatcagatgacgagaacgaaaatgacagtgatacaggtgaagatttggtagattttatagtaaatgataatgattatttaacacaggcagaaacagagacagcacatgcgttgtttactgcacaggaagcaaaacaacatagagatgcagtacaggttctaaaacgaaagtatttgggtagtccacttagtgatattagtggatgtgtagacaataatattagtcctagattaaaagctatatgtatagaaaaacaaagtagagctgcaaaaaggagattatttgaaagcgaagacagcgggtatggcaatactgaagtggaaactcagcagatgttacaggtagaagggcgccatgagactgaaacaccatgtagtcagtatagtggtggaagtgggggtggttgcagtcagtacagtagtggaagtgggggagagggtgttagtgaaagacacactatatgccaaacaccacttacaaatattttaaatgtactaaaaactagtaatgcaaaggcagcaatgttagcaaaatttaaagagttatacggggtgagttttacagaattagtaagaccatttaaaagtaataaatcaacgtgttgcgattggtgtattgctgcatttggacttacacccagtatagctgacagtataaaaacactattacaacaatattgtttatatttacacattcaaagtttagcatgttcatggggaatggttgtgttactattagtaagatataaatgtggaaaaaatagagaaacaattgaaaaattgctgtctaaactattatgtgtgtctccaatgtgtatgatgatagagcctccaaaattgcgtagtacagcagcagcattatattggtataaaacaggtatatcaaatattagtgaagtgtatggagacacgccagaatggatacaaagacaaacagtattacaacatagttttaatgattgtacatttgaattatcacagatggtacaatgggcctacgataatgacatagtagacgatagtgaaattgcatataaatatgcacaattggcagacactaatagtaatgcaagtgcctttctaaaaagtaattcacaggcaaaaattgtaaaggattgtgcaacaatgtgtagacattataaacgagcagaaaaaaaacaaatgagtatgagtcaatggataaaatatagatgtgatagggtagatgatggaggtgattggaagcaaattgttatgtttttaaggtatcaaggtgtagagtttatgtcatttttaactgcattaaaaagatttttgcaaggcatacctaaaaaaaattgcatattactatatggtgcagctaacacaggtaaatcattatttggtatgagtttaatgaaatttctgcaagggtctgtaatatgttttgtaaattctaaaagccatttttggttacaaccattagcagatgccaaaataggtatgttagatgatgctacagtgccctgttggaactatatagatgacaatttaagaaatgcattggatggaaatttagtttctatggatgtaaagcatagaccattggtacaactaaaatgccctccattattaattacatctaacattaatgctggtacagattctaggtggccttatttacataatagattggtggtgtttacatttcctaatgagtttccatttgacgaaaacggaaatccagtgtatgagcttaatgataagaactggaaatcctttttctcaaggacgtggtccagattaagtttgcacgaggacgaggacaaggaaaacgatggagactctttgccaacgtttaaatgtgtgtcaggacaaaatactaacacattatgaaaatgatagtacagacctacgtgaccatatagactattggaaacacatgcgcctagaatgtgctatttattacaaggccagagaaatgggatttaaacatattaaccaccaggtggtgccaacactggctgtatcaaagaataaagcattacaagcaattgaactgcaactaacgttagaaacaatatataactcacaatatagtaatgaaaagtggacattacaagacgttagccttgaagtgtatttaactgcaccaacaggatgtataaaaaaacatggatatacagtggaagtgcagttcgatggagacatatgcaatacaatgcattatacaaactggacacatatatatatttgtgaagaagcatcagtaactgtggtagagggtcaagttgactattatggtttatattatgttcatgaaggaatacgaacatattttgtgcagtttaaagatgatgcagaaaaatatagtaaaaataaagtatgggaagttcatgcgggtggtcaggtaatattatgtcctacatctgtgtttagcagcaacgaagtatcctctcctgaaattattaggcagcacttggccaaccaccccgccgcgacccataccaaagccgtcgccttgggcaccgaagaaacacagacgactatccagcgaccaagatcagagccagacaccggaaacccctgccacaccactaagttgttgcacagagactcagtggacagtgctccaatcctcactgcatttaacagctcacacaaaggacggattaactgtaatagtaacactacacccatagtacatttaaaaggtgatgctaatactttaaaatgtttaagatatagatttaaaaagcattgtaaattgtatactgcagtgtcgtctacatggcattggacaggacataatgtaaaacataaaagtgcaattgttacacttacatatgatagtgaatggcaacgtgaccaatttttgtctcaagttaaaataccaaaaactattacagtgtctactggatttatgtctatatgacaaatcttgatactgcatccacaacattactggcgtgctttttgctttgcttttgtgtgcttttgtgtgtctgcctattaatacgtccgctgcttttgtctgtgtctacatacacatcattaatactattggtattactattgtggataacagcagcctctgcgtttaggtgttttattgtatatattgtatttgtttatataccattatttttaatacatacacatgcacgctttttaattacataatgtatatgtacataatgtaattgttacatataattgttgtataccataacttactattttttcttttttatttttatatataatttttttttttgtttgtttgtttgttttttaataaactgttatcacttaacaatgcgacacaaacgttctgcaaaacgcacaaaacgtgcatcggctacccaactttataaaacatgcaaacaggcaggtacatgtccacctgacattatacctaaggttgaaggcaaaactattgctgatcaaatattacaatatggaagtatgggtgtattttttggtgggttaggaattggaacagggtcgggtacaggcggacgcactgggtatattccattaggaacaaggcctcccacagctacagatacacttgctcctgtaagaccccctttaacagtagatcctgtgggcccttctgatccttctatagtttctttagtggaagaaactagttttattgatgctggtgcaccaacatctgtaccttccattcccccagatgtatcaggatttagtattactacttcaactgataccacacctgctatattagatattaataatactgttactactgttactacacataataatcccactttcactgacccatctgtattgcagcctccaacacctgcagaaactggagggcattttacactttcatcatccactattagtacacataattatgaagaaattcctatggatacatttattgttagcacaaaccctaacacagtaactagtagcacacccataccagggtctcgcccagtggcacgcctaggattatatagtcgcacaacacaacaagttaaagttgtagaccctgcttttgtaaccactcccactaaacttattacatatgataatcctgcatatgaaggtatagatgtggataatacattatattttcctagtaatgataatagtattaatatagctccagatcctgactttttggatatagttgctttacataggccagcattaacctctaggcgtactggcattaggtacagtagaattggtaataaacaaacactacgtactcgtagtggaaaatctataggtgctaaggtacattattattatgatttcagtactattgatcctgcagaagaaatagaattacaaactataacaccttctacacatactaccacttcacatgcagcctcacctacttctattaataatggattatatgatatttatgcagatgactttattacagatacttctacaaccccggtaccatctgtaccctctacatctttatcaggttatattcctgcaaatacaacaattccttttggtggtgcatacaatattcctttagtatcaggtcctgatatacccattaatataactgaccaagctccttcattaattcctatagttccagggtctccacaatatacaattattgctgatgcaggtgacttttatttacatcctagttattacatgttacgaaaacgacgtaaacgtttaccatattttttttcagatgtctctttggctgcctagtgaggccactgtctacttgcctcctgtcccagtatctaaggttgtaagcacggatgaatatgttgcacgcacaaacatatattatcatgcaggaacatccagactacttgcagttggacatccctattttcctattaaaaaacctaacaataacaaaatattagttcctaaagtatcaggattacaatacagggtatttagaatacatttacctgaccccaataagtttggttttcctgacacctcattttataatccagatacacagcggctggtttgggcctgtgtaggtgttgaggtaggtcgtggtcagccattaggtgtgggcattagtggccatcctttattaaataaattggatgacacagaaaatgctagtgcttatgcagcaaatgcaggtgtggataatagagaatgtatatctatggattacaaacaaacacaattgtgtttaattggttgcaaaccacctataggggaacactggggcaaaggatccccatgtaccaatgttgcagtaaatccaggtgattgtccaccattagagttaataaacacagttattcaggatggtgatatggttgatactggctttggtgctatggactttactacattacaggctaacaaaagtgaagttccactggatatttgtacatctatttgcaaatatccagattatattaaaatggtgtcagaaccatatggcgacagcttatttttttatttacggagggaacaaatgtttgttagacatttatttaatagggctggtgctgttggtgaaaatgtaccagacgatttatacattaaaggctctgggtctactgcaaatttagccagttcaaattattttcctacacctagtggttctatggttacctctgatgcccaaatattcaataaaccttattggttacaacgagcacagggccacaataatggcatttgttggggtaaccaactatttgttactgttgttgatactacacgcagtacaaatatgtcattatgtgctgccatatctacttcagaaactacatataaaaatactaactttaaggagtacctacgacatggggaggaatatgatttacagtttatttttcaactgtgcaaaataaccttaactgcagacgttatgacatacatacattctatgaattccactattttggaggactggaattttggtctacaacctcccccaggaggcacactagaagatacttataggtttgtaacatcccaggcaattgcttgtcaaaaacatacacctccagcacctaaagaagatccccttaaaaaatacactttttgggaagtaaatttaaaggaaaagttttctgcagacctagatcagtttcctttaggacgcaaatttttactacaagcaggattgaaggccaaaccaaaatttacattaggaaaacgaaaagctacacccaccacctcatctacctctacaactgctaaacgcaaaaaacgtaagctgtaagtattgtatgtatgttgaattagtgttgtttgttgtttatatgtttgtatgtgcttgtatgtgcttgtaaatattaagttgtatgtgtgtttgtatgtatggtataataaacacgtgtgtatgtgtttttaaatgcttgtgtaactattgtgtcatgcaacataaataaacttattgtttcaacacctactaattgtgttgtggttattcattgtatataaactatatttgctacatcctgtttttgttttatatatactatattttgtagcgccagcggccattttgtagcttcaaccgaattcggttgcatgctttttggcacaaaatgtgttttttcaaatagttctatgtcagcaactatagtttaaacttgtacgtttcctgcttgccatgcgtgccaaatccctgttttcctgacctgcactgcttgccaaccattccattgttttttacactgcactatgtgcaactactgaatcactatgtacattgtgtcatataaaataaatcactatgcgccaacgccttacataccgctgttaggcacatatttttggcttgttttaactaacctaattgcatatttggcataaggtttaaacttctaaggccaactaaatgtcaccctagttcatacatgaactgtgtaaaggttagtcatacattgttcatttgtaaaactgcacatgggtgtgtgcaaaccgttttgggttacacatttacaagcaacttatataataatactaaactacaataattcatgtataaaactaagggcgtaaccgaaatcggttgaaccgaaaccggttagtataaaagcagacattttatgcaccaaaagagaactgcaatgtttcaggacccacaggagcgacccagaaagttaccacagttatgcacagagctgcaaacaactatacatgatataatattagaatgtgtgtactgcaagcaacagttactgcgacgtgaggtatatgactttgcttttcgggatttatgcatagtatatagagatgggaatccatatgctgtatgtgataaatgtttaaagttttattctaaaattagtgagtatagacattattgttatagtttgtatggaacaacattagaacagcaatacaacaaaccgttgtgtgatttgttaattaggtgtattaactgtcaaaagccactgtgtcctgaagaaaagcaaagacatctggacaaaaagcaaagattccataatataaggggtcggtggaccggtcgatgtatgtcttgttgcagatcatcaagaacacgtagagaaacccagctgtaatcatgcatggagatacacctacattgcatgaatatatgttagatttgcaaccagagacaactgatctctactgttatgagcaattaaatgacagctcagaggaggaggatgaaatagatggtccagctggacaagcagaaccggacagagcccattacaatattgtaaccttttgttgcaagtgtgactctacgcttcggttgtgcgtacaaagcacacacgtagacattcgtactttggaagacctgttaatgggcacactgggaattgtgtgccccatctgttctcagaaaccataatctacc

SEQ ID NO: 47 - DNA, 7906 bp, Homo sapiens
  source 1..7906: mol_type = genomic DNA; note = UNCseq2010
atggctgatcctgcaggtaccaatggggaagagggtacgggatgtaatggatggttttatgtagaggctgtagtggaaaaaaaaacaggggatgctatatcagatgacgagaacgaaaatgacagtgatacaggtgaagatttggtagattttatagtaaatgataatgattatttaacacaggcagaaacagagacagcacatgcgttgtttactgcacaggaagcaaaacaacatagagatgcagtacaggttctaaaacgaaagtatttgggtagtccacttagtgatattagtggatgtgtagacaataatattagtcctagattaaaagctatatgtatagaaaaacaaagtagagctgcaaaaaggagattatttgaaagcgaagacagcgggtatggcaatactgaagtggaaactcagcagatgttacaggtagaagggcgccatgagactgaaacaccatgtagtcagtatagtggtggaagtgggggtagttgcagtcagtacagtagtggaagtgggggagagggtgttagtgaaagacacactatatgccaaacaccacttacaaatattttaaatgtactaaaaactagtaatgcaaaggcagcaatgttagcaaaatttaaagagttatacggggtgagtttttcagaattagtaagaccatttaaaagtaataaatcaacgtgttgcgattggtgtattgctgcatttggacttacacccagtatagctgacagtataaaaacactattacaacaatattgtttatatttacacattcaaagtttagcatgttcatggggaatggttgtgttactattagtaagatataaatgtggaaaaaatagagaaacaattgaaaaattgctgtctaaactattatgtgtgtctccaatgtgtatgatgatagagcctccaaaattgcgtagtacagcagcagcattatattggtataaaacaggtatatcaaatattagtgaagtgtatggagacacgccagaatggatacaaagacaaacagtattacaacatagttttaatgattgtacatttgaattatcacagatggtacaatgggcctacgataatgacatagtagacgatagtgaaattgcatataaatatgcacaattggcagacactaatagtaatgcaagtgcctttctaaaaagtaattcacaggcaaaaattgtaaaggattgtgcaacaatgtgtagacattataaacgagcagaaaaaaaacaaatgagtatgagtcaatggataaaatatagatgtgatagggtagatgatggaggtgattggaagcaaattgttatgtttttaaggtatcaaggtgtagagtttatgtcatttttaactgcattaaaaagatttttgcaaggcatacctaaaaaaaattgcatattactatatggtgcagctaacacaggtaaatcattatttggtatgagtttaatgaaatttctgcaagggtctgtaatatgttttgtaaattctaaaagccatttttggttacaaccattagcagatgccaaaataggtatgttagatgatgctacagtgccctgttggaactacatagatgacaatttaagaaatgcattggatggaaatttagtttctatggatgtaaagcatagaccattggtacaactaaaatgccctccattattaattacatctaacattaatgctggtacagattctaggtggccttatttacataatagattggtggtgtttacatttcctaatgagtttccatttgacgaaaacggaaatccagtgtatgagcttaatgataagaactggaaatcctttttctcaaggacgtggtccagattaagtttgcacgaggacgaggacaaggaaaacgatggagactctttgccaacgtttaaatgtgtgtcaggacaaaatactaacacattatgaaaatgatagtacagacctacgtgaccatatagactattggaaacacatgcgcctagaatgtgctatttattacaaggccagagaaatgggatttaaacatattaaccaccaggtggtgccaacactggctgtatcaaagaataaagcattacaagcaattgaactgcaactaacgttagaaacaatatataactcacaatatagtaatgaaaagtggacattacaagacgttagccttgaagtgtatttaactgcaccaacaggatgtataaaaaaacatggatatacagtggaagtgcagtttgatggagacatatgcaatacaatgcattatacaaactggacacatatatatatttgtgaagaagcatcagtaactgtggtagagggtcaagttgactattatggtttatattatgttcatgaaggaatacgaacatattttgtgcagtttaaagatgatgcagaaaaatatagtaaaaataaagtatgggaagttcatgcgggtggtcaggtaatattatgtcctacatctgtgtttagcagcaacgaagtatcctctcctgaaattattaggcagcacttggccaaccaccccgccgcgacccataccaaagccgtcgccttgggcaccgaagaaacacagacgactatccagcgaccaagatcagagccagacaccggaaacccctgccacaccactaagttgttgcacagagactcagtggacagtgctccaatcctcactgcatttaacagctcacacaaaggacggattaactgtaatagtaacactacacccatagtacatttaaaaggtgatgctaatactttaaaatgtttaagatatagatttaaaaagcattgtacattgtatactgcagtgtcgtctacatggcattggacaggacataatgtaaaacataaaagtgcaattgttacacttacatatgatagtgaatggcaacgtgaccaatttttgtctcaagttaaaataccaaaaactattacagtgtctactggatttatgtctatatgacaaatcttgatactgcatccacaacattactggcgtgctttttgctttgcttttgtgtgcttttgtgtgtctgcctattaatacgtccgctgcttttgtctgtgtctacatacacatcattaataatattggtattactattgtggataacagcagcctctgcgtttaggtgttttattgtatatattatatttgtttatataccattatttttaatacatacacatgcacgctttttaattacataatgtatatgtacataatgtaattgttacatataattgttgtataccataacttactattttttcttttttattttcatatataatttttttttttgtttgtttgtttgttttttaataaactgttattacttaacaatgcgacacaaacgttctgcaaaacgcacaaaacgtgcatcggctacccaactttataaaacatgcaaacaggcaggtacatgtccacctgacattatacctaaggttgaaggcaaaactattgctgatcaaatattacaatatggaagtatgggtgtattttttggtgggttgggaattggaacagggtcgggtacaggcggacgcactgggtatattccattgggaacaaggcctcccacagctacagatacacttgctcctgtaagaccccctttaacagtagatcctgtgggcccttctgatccttctatagtttctttagtggaagaaactagttttattgatgctggtgcaccaacatctgtaccttccattcccccagatgtatcaggatttagtattactacttcaactgataccacacctgctatattagatattaataatactgttactactgttactacacataataatcccactttcactgacccatctgtattgcagcctccaacacctgcagaaactggagggcattttacactttcatcatccactattagtacacataattatgaagaaattcctatggatacatttattgttagcacaaaccctaacacagtaactagtagcacacccataccagggtctcgcccagtggcacgcctaggattatatagtcgcacaacacaacaagttaaagttgtagaccctgcttttgtaaccactcccactaaacttattacatatgataatcctgcatatgaaggtatagatgtggataatacattatatttttctagtaatgataatagtattaatatagctccagatcctgactttttggatatagttgctttacataggccagcattaacctctaggcgtactggcattaggtacagtagaattggtaataaacaaacactacgtactcgtagtggaaaatctataggtgctaaggtacattattattatgatttcagtactattgatcctgcagaagaaatagaattacaaactataacaccttctacatatactaccacttcacatgcagcctcacctacttctattaataatggattatatgatatttatgcagatgactttattacagatacttctacaaccccggtaccatctgtaccctctacatctttatcaggttatattcctgcaaatacaacaattccttttggtggtgcatacaatattcctttagtatcaggtcctgatatacccattaatataactgaccaagctccttcattaattcccatagttccggggtctccacaatatacaattattgctgatgcaggtgacttttatttacatcctagttattacatgttacgaaaacgacgtaaacgtttaccatattttttttcagatgtctctttggctgcctagtgaggccactgtctacttgcctcctgtcccagtatctaaggttgtaagcacggatgaatatgttgcacgcacaaacatatattatcatgcaggaacatccagactacttgcagttggacatccctattttcctattaaaaaacctaacaataacaaaatattagttcctaaagtatcaggattacaatacagggtatttagaatacatttacctgaccccaataagtttggttttcctgacacctcattttataatccagatacacagcggctggtttgggcctgtgtaggtgttgaggtaggtcgtggtcagccattaggtgtgggcattagtggccatcctttattaaataaattggatgacactgaaaatgctagtgcttatgcagcaaatgcaggtgtggataatagagaatgtatatctatggattacaaacaaacacaattgtgtttaattggttgcaaaccacctataggggaacactggggcaaaggatccccatgtaccaatgttgcagtaaatccaggtgattgtccaccattagagttaataaacacagttattcaggatggtgatatggttgatactggctttggtgctatggactttactacattacaggctaacaaaagtgaagttccactggatatttgtacatctatttgcaaatatccagattatattaaaatggtgtcagaaccatatggcgacagcttatttttttatttacgaagggaacaaatgtttgttagacatttatttaatagggctggtactgttggtgaaaatgtaccagacgatttatacattaaaggctctgggtctactgcaaatttagccagttcaaattattttcctacacctagtggttctatggttacctctgatgcccaaatattcaataaaccttattggttacaacgagcacagggccacaataatggcatttgttggggtaaccaactatttgttactgttgttgatactacacgcagtacaaatatgtcattatgtgctgccatatctacttcagaaactacatataaaaatactaactttaaggagtacctacgacatggggaggaatatgatttacagtttatttttcaactgtgcaaaataaccttaactgcagacgttatgacatacatacattctatgaattccactattttggaggactggaattttggtctacaacctcccccaggaggcacactagaagatacttataggtttgtaacatcccaggcaattgcttgtcaaaaacatacacctccagcacctaaagaagatccccttaaaaaatacactttttgggaagtaaatttaaaggaaaagttttctgcagacctagatcagtttcctttaggacgcaaatttttactacaagcaggattgaaggccaaaccaaaatttacattaggaaaacgaaaagctacacccaccacctcatctacctctacaactgctaaacgcaaaaaacgtaagctgtaagtattgtatgtatgttgaattagtgttgtttgttgtgtatatgtttgtatgtgcttgtatgtgcttgtaaatattaagttgtatgtgtgtttgtatgtatggtataataaacacgtgtgtatgtgtttttaaatgcttgtgtaactattgtgtcatgcaacataaataaacttattgtttcaacacctactaattgtgttgtggttattcattgtatataaactatatttgctacatcctgtttttgttttatatatactatattttgtagcgccagcggccattttgtagcttcaaccgaattcggttgcatgctttttggcacaaaatgtgtttttttaaatagttctatgtcagcaactatggtttaaacttgtacgtttcctgcttgccatgcgtgccaaatccctgttttcctgacctgcactgcttgccaaccattccattgttttttacactgcactatgtgcaactactgaatcactatgtacattgtgtcatataaaataaatcactatgcgccaacgccttacataccgctgttaggcacatatttttggcttgttttaactaacctaattgcatatttggcataaggtttaaacttctaaggccaactaaatgtcaccctagtttatacatgaactgtgtaaaggttagtcatacattgttcatttgtaaaactgcacatgggtgtgtgcaaaccgttttgggttacacatttacaagcaacttatataataatactaaactacaataattcatgtataaaactaagggcgtaaccgaaatcggttgaaccgaaaccggttagtataaaagcagacattttatgcaccaaaagagaactgcaatgtttcaggacccacaggagcgacccagaaagttaccacagttatgcacagagctgcaaacaactatacatgatataatattggaatgtgtgtactgcaagcaacagttactgcgacgtgaggtatatgactttgcttttcgggatttatgcatagtatatagagatgggaatccatatgctgtatgtgataaatgtttaaagttttattctaaaattagtgagtatagacattattgttatagtttgtatggaacaacattagaacagcaatacaacaaaccgttgtgtgatttgttaattaggtgtattaactgtcaaaagccactgtgtcctgaagaaaagcaaagacatctggacaaaaagcaaagattccataatataaggggtcggtggaccggtcgatgtatgtcttgttgcagatcatcaagaacacgtagagaaacccagctgtaatcatgcatggagatacacctacattgcatgaatatatgttagatttgcaaccagagacaactgatctctactgttatgagcaattaaatgacagctcagaggaggaggatgaaatagatggtccagctggacaagcagaaccggacagagcccattacaatattgtaaccttttgttgcaagtgtgactctacgcttcggttgtgcgtacaaagcacacacgtagacattcgtactttggaagacctgttaatgggcacactaggaattgtgtgccccatctgttctcagaaaccataatctacc

SEQ ID NO: 48 - DNA, 7906 bp, Homo sapiens
  source 1..7906: mol_type = genomic DNA; note = UNCseq2012
atggctgatcctgcaggtaccaatggggaagagggtacgggatgtaatggatggttttatgtagaggctgtagtggaaaaaaaaacaggggatgctatatcagatgacgagaacgaaaatgacagtgatacaggtgaagatttggtagattttatagtaaatgataatgattatttaacacaggcagaaacagagacagcacatgcgttgtttactgcacaggaagcaaaacaacatagagatgcagtacaggttctaaaacgaaagtatttgggtagtccacttagtgatattagtgaatgtgtagacaataatattagtcctagattaaaagccatatgtatagaaaaacaaagtagagctgcaaaaaggagattatttgaaagcgaagacagcgggtatggcaatactgaagtggaaactcagcagatgttacaggtagaagggcgccatgagactgaaacaccatgtagtcagtatagtggtggaagtgggggtggtagcagtcagtacagtagtggaagtgggggagagggtgttagtgaaagacacactatatgcgaaacaccacttacaaatattttaaatgtactaaaaactagtaatgcaaaggcagcaatgctagcaaaatttaaagagttatacggggtgagtttttcagaattagtaagaccatttaaaagtaataaatcaacgtgttgcgattggtgtattgctgcatttggacttacacccagtatagctgacagtataaaaacattattacaacaatattgtttatatttacacattcaaagtttagcatgttcatggggaatggttgtgttactattagtaagatataaatgtggaaaaaatagagaaacaattgaaaaattgatgtctaaactattatgtgtgtctccaatgtgtatgatgatagagcctccaaaattgcgtagtacagcagcagcattatattggtataaaacaggtatgtcaaatattagtgaagtgtatggagacacgccagaatggatacaaagacaaacagtattacaacatagttttaatgattgtacatttgaattatcacagatggtacaatgggcctacgataatgacatagtagacgatagtgaaattgcatataaatatgcacaattggcagacactaatagtaatgcaagtgcctttttaaaaagtaattcacaggcaaaaattgtaaaggattgtgcaacaatgtgtagacattataaacgagcagaaaaaaaacaaatgagtatgagtcaatggataaaatatagatgtgatagggtagatgatggaggtgattggaagcaaattgttatgtttttaaggtatcaaggtgtagagtttatgtcatttttaagtgcattaaaaaaatttttgcaaggtatacctaaaaaaaattgcatattattatatggtgcagctaacacaggtaaatcattatttggtatgagtttaatgaaatttctgcaagggtccgtaatatgttttgtaaattctaaaagccatttttggttacaaccattagcagatgccaaaataggtatgttagatgatgctacagtgccctgttggaactacatagatgacaatttaagaaatgcattggatggaaatttagtttctatggatgtaaagcatagaccattggtacaactaaaatgccctccattattaattacatctaacattaatgctggtacagattctaggtggccttatttacataatcgattggtggtgtttacatttcctaatgagtttccatttgacgaaaacggaaatccagtgtatgagcttaatgataagaactggaaatcctttttctcaaggacgtggtccagattaagtttgcacgaggacgaggacaaggaaaacgatggagactctttgccaacgtttaaatgtgtgtcaggacaaaatactaacacattatgaaaatgatagtacagacctacgtgaccatatagactattggaaacacatgcgcctagaatgtgctatttattacaaggccagagaaatgggatttaaacatattaaccaccaggtggtgccaacactggctgtatcaaagaataaagcattacaagcaattgaactgcaactaacgttagaaacaatatataactcacaatatagtaatgaaaagtggacattacaagacgttagccttgaagtgtatttaactgcaccaacaggatgtataaaaaaacatggatatacagtggaagtgcagtttgatggagacatatgcaatacaatgcattatacaaactggaaacatatatatatttgtgaagaaacatcagtaactgtggtagagggtcaagttgactattatggtttatattatgttcatgaaggaatacgaacatattttgtgcagtttaaagatgatgcagaaaaatatagtaaaaataaagtatgggaagttcatgcgggtggtcaggtaatattatgtcctacatctgtgtttagcagcgacgaagtatcctctcctgaaattattaggcagcacttggccaaccactccgccgcgacccataccaaaaccgtcgccttgggcaccaaagaaacacagacgactatccagcgaccaagatcagagccagacaccggaaacccctgccacaccactaagttgttgcacagagactccgtggacagtgctccaatcctcactgcagttaacagctcacacaaaggacggattaactgtaatagtaacactacacccatagtacatttaaaaggtgatgctaatactttaaaatgtttaagatatagatttaaaaagcattgtacattgtatactgcagtgtcgtccacatggcattggacaggacataatgtaaaacataaaagtgcaattgttacacttacatatgatagtgaatggcaacgtgaccaatttttgtgtcaagtgaaaataccaaaaactattacagtgtctactggatttatgtctatatgacaaatcttgatactgcatccacaacattactggcgtgctttttgctttgcttttgtgtgcttttgtgtgtctgcctattaatacgtccgctgcttttgtctgtgtctacatacacatcattaatactattggtattattattgtggataacagcagcctctgcgtttaggtgttttattgtatatattgtatttgtttatataccattatttttaatacatacacatgcacgcttcttaattacataatgtatatgtacataatgtaattgttacatataattgttgtataccatcacttactaatttttcttttgtatttttatatatagtttttttttttgtttatttgtttgttttttaataaactgttattacttaacaatgcgacacaaacgttctgcaaaacgcacaaaacgtgcatcggccacccaactttataaaacatgcaaacaggcaggtacatgtccacctgacattatacctaaggttgaaggcaaaactattgctgatcaaatattacaatatggaagtatgggtgtattttttggtggattaggaattggaacagggtcgggtacaggcggacgcactgggtatattccattgggaacaaggcctcccacagctacagatacacttgctcctgtaagaccccctttaacagtagatcctgtgggcccttctgatccttctatagtttctttagtggaagaaactagttttattgatgctggtgcaccaacacctgtaccttccattcccccagatgtatcaggatttagtattacaacttcaactgataccacacctgctatattagatattaataatactgttacaactgttactacacataataatcccacttttactgacccatccgtattgcagcctccaacacctgcagaaactggagggcattttacactttcatcatccactattagtacacataattatgaagaaattcctatggatacatttattgttagcacaaaccctaacacagtaactagtagcacacccataccggggtctcgcccagtggcacgcctaggattatatagtcgcacaacacaacaagttaaagttgtagaccctgcttttgtaaccactcccactaaacttattacatatgataatcctgcatatgaaggtatagatgtggataatacattatattttcctagtaatgataatagtattaatatagctccagatcctgactttttggatatagttgctttacataggccagcattaacctctaggcgtactggcattagatacagtagaattggtaataaacaaacactacgtactcgtagtggaaaatctataggtgctaaggtacattattattatgatttaagtactattaatcctgcagaagaaatagaattgcaaactataacaccttctacatatactaccccttcacatgcagcctcacctacttctattaataatggattatatgatatttatgcagatgactttattacagatacttctacaaccccggtaccatctacaccctctacatctttatcaggttatattcctgcaaatacaacaattccttttggtggtgcatacaatattcctttagtatcaggtcctgatatacctattaatacaactgaccaaactccttcattaattcctatagttccagggtctccacaatatacaattattgctgatggaggtgacttttatttacatcctagttattacatgttacgaaaacgacgtaaacgtttaccatattttttttcagatgtctctttggctgcctagtgaggccactgtctacttgcctcctgtcccagtatctaaagttgtaagcacggatgaatatgttgcacgcacaaacatatattatcatgcaggaacatccagactacttgcagttggacatccctattttcctattaaaaaacctaacaataacaaaatattagttcctaaagtatcaggattacaatacagggtatttagaatacatttacctgaccccaataagtttggttttcctgacacctcattttacaatccagatacacagcggctggtttgggcctgtgtaggtgttgaggtaggtcgtggtcagccattaggtgtgggcattagtggccatcctttattaaataaattggatgacacagaaaatgctagtgcttatgcagcaaatgcaggtgtggataatagagaatgtatatctatggattacaaacaaacacaattgtgtttaattggttgcaaaccacctataggggaacactggggcaaaggatccccatgtaccaatgttgcagtaaatccaggtgattgtccaccattagagttaataaacacagttattcaggatggtgatatggttgataccggctttggtgctatggactttactacattacaggctaacaaaagtgaagttccactggatatttgtacgtctatttgcaaatatccagattatattaaaatggtgtcagaaccatatggcgacagcttatttttttatttacgaagggaacaaatgtttgttagacatttatttaatagggctggtgctgttggtgaaaatgtaccagacgatttatacattaaaggctctgggcctactgcaaatttagccagttcaaattattttcctacacctagtggttctatggttacctctgatgcccaaatatttaataaaccttattggttacaacgagcacagggccacaataatggcatttgttggggtaaccaactatttgttactgttgttgatactacacgcagtacaaatatgtcattatgtgctgccatatctacttcagaacctacatataaaaatactaactttaaggagtacctacgacatggggaggaatatgatttacagtttatttttcaactgtgcaaaataaccttaactgcagacgttatgacatacatacattctatgaattccactattttggaggactggaattttggtttacaacctcctccaggaggcacactagaagatacttataggtttgtaacatcccaggcaattgcttgtcaaaaacatacacctccagcacctaaagaagatccccttaaaaaatatactttttgggaagtaaatttaaaagaaaagttttctgcagacctagatcagtttcctttaggacgcaaatttttactacaagcaggatttaaggccaaaccaaaatttacattaggaaaacgaaaagctacacccaccacctcatctacctctacaactgctaaacgcaaaaaacgtaagctgtaagtattgtatgtatgttgaattagtgttgtttgttgtttatatgtttgtatgtgcttgtatgtgcttgtaaatattaagttgtatgtgtgtttgtatgtatggtataataaacacgtgtgtatgtggttttaaatgcttgtgtaactattgtgtcatgcaacataaataaacttattgtttcaacacctactaattgtgttgtggttattcattgtctataaactatatttgctacatcctgtttttgttttatatatactatattttgtagcgccagcggccattttgtagcttcaaccgaattcggttgcatgctttttggcacaaactgtatttttttaaatagttctatgtcagcaactatagtttaaacttgtacgtttcctgcttgccatgcgtgccaaatccctgttttcctgacctgcactgcttgccaaccattccattgttttttacactgcactatgtgcaactactgaatcactatgtacattgtgtcatataaaataaatcactatgcgccaacgccttacataccgctgttaggcacatatttttggcttgttttaactaacctaattgcatatttggcataaggtttaaacttttagggccaactaaatgtcaccttagttcatacatgaactgtgtaaaggttagtcatacattattcatttttacagctgcacatgggtgtgtgcaaaccgttttaggttacacatttacaagcaacttatataataatactaaactacaataattcatgtataaaactaagggtgtaaccgaaatcggttgaaccgaaaccggttagtataaaagcagacattttatgcaccaaaagagaactgcaatgttccaggacccacaggagcgacccagaaagttaccagagttatgcacagagctgcaaacaactatacatgatataatattagaatgtgtgtactgcaagcaacagttactgcgacgtgaggtatatgactttgcttttcgggatttatgcatagtatatagagatgggaatccatatgcagtgtgtgataaatgtttaaagttttattctaaaattagtgagtatagatattattgttatagtttgtatggaacaacattagaacagcaatacaacaaaccgttgtgtgatttgttgattaggtgtattaactgtcaaaagccactgtgtcctgaagaaaagcaaagacatctggacaaaaagcaaagattccataatataaggggtcggtggaccggtcgatgtatgtcttgttgcagatcatcaagaacacgtagagaaacccagctgtaatcatgcatggagatacacctacattgcatgaatatatgttagatttgcaaccagagacaactgatctctactgttatgagcaattaaatgacagctcagaggaggaggatgaaatagatggtccagctggacaagcagaaccggacagagcccattacaatattgtaaccttttgttgcaagtgtgactctacgcttcggttgtgcgtacaaagcacacacgtagacatccgtacgttggaagacctgttaatgggcacactaggaattgtgtgccccatctgttctcagaaaccataatctacc

SEQ ID NO: 49 - DNA, 7906 bp, Homo sapiens
  source 1..7906: mol_type = genomic DNA; note = UNCseq2025
atggctgatcctgcaggtaccaatggggaagagggtacgggatgtaatggatggttttatgtagaggctgtagtggaaaaaaaaacaggggatgctatatcagatgacgagaacgaaaatgacagtgatacaggtgaagatttggtagattttatagtaaatgataatgattatttaacacaggcagaaacagagacagcacatgcgttgtttactgcacaggaagcaaaacaacatagagatgcagtacaggttctaaaacgaaagtatttgggtagtccacttagtgatattagtggatgtgtagacaataatattagtcctagattaaaagctatatgtatagaaaaacaaagtagagctgcaaaaaggagattatttgaaagcgaagacagcgggtatggcaatactgaagtggaaactcagcagatgttacaggtagaagggcgccatgagactgaaacaccatgtagtcagtatagtggtggaagtgggggtggttgcagtcagtacagtagtggaagtgggggagagggtgttagtgaaagacacactatatgccaaacaccacttacaaatattttaaatgtactaaaaactagtaatgcaaaggcagcaatgttagcaaaatttaaagagttatacggggtgagtttttcagaattagtaagaccatttaaaagtaataaatcaacgtgttgcgattggtgtattgctgcatttggacttacacccagtatagctgacagtataaaaacactattacaacaatattgtttatatttacacattcaaagtttagcatgttcatggggaatggttgtgttactattagtaagatataaatgtggaaaaaatagagaaacaattgaaaaattgctgtctaaactattatgtgtgtctccaatgtgtatgatgatagagcctccaaaattgcgtagtacagcagcagcattatattggtataaaacaggtatatcaaatattagtgaagtgtatggagacacgccagaatggatacaaagacaaacagtattacaacatagttttaatgattgtacatttgaattatcacagatggtacaatgggcctacgataatgacatagtagacgatagtgaaattgcatataaatatgcacaattggcagacactaatagtaatgcaagtgcctttctaaaaagtaattcacaggcaaaaattgtaaaggattgtgcaacaatgtgtagacattataaacgagcagaaaaaaaacaaatgagtatgagtcaatggataaaatatagatgtgatagggtagatgatggaggtgattggaagcaaattgttatgtttttaaggtatcaaggtgtagagtttatgtcatttttaactgcattaaaaagatttttgcaaggcatacctaaaaaaaattgcatattactatatggtgcagctaacacaggtaaatcattatttggtatgagtttaatgaaatttctgcaagggtctgtaatatgttttgtaaattctaaaagccatttttggttacaaccattagcagatgccaaaataggtatgttagatgatgctacagtgccctgttggaactacatagatgacaatttaagaaatgcattggatggaaatttagtttctatggatgtaaagcatagaccattggtacaactaaaatgccctccattattaattacatctaacattaatgctggtacagattctaggtggccttatttacataatagattggtggtgtttacatttcctaatgagtttccatttgacgaaaacggaaatccagtgtatgagcttaatgataagaactggaaatcctttttctcaaggacgtggtccagattaagtttgcacgaggacgaggacaaggaaaacgatggagactctttgccaacgtttaaatgtgtgtcaggacaaaatactaacacattatgaaaatgatagtacagacctacgtgaccatatagactattggaaacacatgcgcctagaatgtgctatttattacaaggccagagaaatgggatttaaacatattaaccaccaggtggtgccaacactggctgtatcaaagaataaagcattacaagcaattgaactgcaactaacgttagaaacaatatataactcacaatatagtaatgaaaagtggacattacaagacgttagccttgaagtgtatttaactgcaccaacaggatgtataaaaaaacatggatatacagtggaagtgcagtttgatggagacatatgcaatacaatgcattatacaaactggacacatatatatatttgtgaagaagcatcagtaactgtggtagagggtcaagttgactattatggtttatattatgttcatgaaggaatacgaacatattttgtgcagtttaaagatgatgcagaaaaatatagtaaaaataaagtatgggaagttcatgcgggtggtcaggtaatattatgtcctacatctgtgtttagcagcaacgaagtatcctctcctgaaattattaggcagcacttggccaaccactccgccgcgacccataccaaagccgtcgccttgggcaccgaagaaacacagacgactatccagcgaccaagatcagagccagacaccggaaacccctgccacaccactaagttgttgcacagagactcagtggacagtgctccaatcctcactgcatttaacagctcacacaaaggacggattaactgtaatagtaacactacacccatagtacatttaaaaggtgatgctaatactttaaaatgtttaagatatagatttaaaaagcattgtacattgtatactgcagtgtcgtctacatggcattggacaggacataatgtaaaacataaaagtgcaattgttacacttacatatgatagtgaatggcaacgtgaccaatttttgtctcaagttaaaataccaaaaactattacagtgtctactggatttatgtctatatgacaaaccttgatactgcatccacaacattactggcgtgctttttgctttgcttttgtgtgcttttgtgtgtctgcctattaatacgtccgctgcttttgtctgtgtctacatacacatcattaatactattggtattactattgtggataacagcagcctctgcgtttaggtgttttattgtatatattgtatttgtttatataccattatttttaatacatacacatgcacgctttttaattacataatgtatatgtacaaaatgtaattgttacatataattgttgtataccataacttactatttttttttttttattttcatatatattttttttttttgtttgtttgtttgttttttaataaactgttatcacttaacaatgcgacacaaacgttctgcaaaacgcacaaaacgtgcatcggctacccaactttataaaacatgcaaacaggcaggtacatgtccacctgacattatacctaaggttgaaggcaaaactattgctgatcaaatattacaatatggaagtatgggtgtattttttggtgggttaggaattggaacagggtcgggtacaggcggacgcactgggtatattccattgggaacaaggcctcccacagctacagatacacttgctcctgtaagaccccctttaacagtagatcctgtgggcccttctgatccttctatagtttctttagtggaagaaactagttttattgatgctggtgcaccaacatctgtaccttccattcccccagatgtatcaggatttagtattactacttcaactgataccacacctgctatattagatattaataatactgttactactgttactacacataataatcccactttcactgacccatctgtattgcagcctccaacacctgcagaaactggagggcattttacactttcatcatccactattagtacacataattatgaagaaattcctatggatacatttattgttagcacaaaccctaacacagtaactagtagcacacccataccagggtctcgcccagtggcacgcctaggattatatagtcgcacaacacaacaagttaaagttgtagaccctgcttttataaccactcccactaaacttattacatatgataatcctgcatatgaaggtatagatgtggataatacattatatttttctagtaatgataatagtattaatatagctccagatcctgactttttggatatagttgctttacataggccagcattaacctctaggcgtactggcattaggtatagtagaattggtaataaacaaacactacgtactcgtagtggaaaatctataggtgctaaggtacattattattatgattttagtactattgatcctgcagaagaaatagaattacaaactataacaccttctacatatactaccacttcacatgcagcctcacctacttctattaataatggattatatgatatttatgcagatgactttattacagatacttctacaaccccggtaccatctgtaccctctacatctttatcaggttatattcctgcaaatacaacaattccttttggtggtgcatacaatattcctttagtatcaggtcctgatatacccattaatataactgaccaagctccttcattaattcctatagttccagggtctccacaatatacaattattgctgatgcaggtgacttttatttacatcctagttattacatgttacgaaaacgacgtaaacgtttaccatattttttttcagatgtctctttggctgcctagtgaggccactgtctacttgcctcctgtcccagtatctaaggttgtaagcacggatgaatatgttgcacgcacaaacatatattatcatgcaggaacatccagactacttgcagttggacatccctattttcctattaaaaaacctaacaataacaaaatattagttcctaaagtatcaggattacaatacagggtatttagaatacatttacctgaccccaataagtttggttttcctgacacctcattttataatccagatacacagcggctggtttgggcctgtgtaggtgttgaggtaggtcgtggtcagccattaggtgtgggcattagtggccatcctttattaaataaattggatgacacagaaaatgctagtgcttatgcagcaaatgcaggtgtggataatagagaatgtatatctatggattacaaacaaacacaattgtgtttaattggttgcaaaccacctataggggaacactggggcaaaggatccccatgtaccaatgttgcagtaaatccaggtgattgtccaccattagagttaataaacacagttattcaggatggtgatatggttgatactggctttggtgctatggactttactacattacaggctaacaaaagtgaagttccactggatatttgtacatctatttgcaaatatccagattatattaaaatggtgtcagaaccatatggcgacagcttatttttttatttacgaagggaacaaatgtttgttagacatttatttaatagggctggtgctgttggtgaaaatgtaccagacgatttatacattaaaggctctgggtctactgcaaatttagccagttcaaattattttcctacacctagtggttctatggttacctctgatgcccaaatattcaataaaccttattggttacaacgagcacagggccacaataatggcatttgttggggtaaccaactatttgttactgttgttgatactacacgcagtacaaatatgtcattatgtgctgccatatctacttcagaaactacatataaaaatactaactttaaggagtacctacgacatggggaggaatatgatttacagtttatttttcaactgtgcaaaataaccttaactgcagacgttatgacatacatacattctatgaattccactattttggaggactggaattttggtctacaacctcccccaggaggcacactagaagatacttataggtttgtaacatcccaggcaattgcttgtcaaaaacatacacctccagcacctaaagaagatccccttaaaaaatacactttttgggaagtaaatttaaaggaaaagttttctgcagacctagatcagtttcctttaggacgcaaatttttactacaagcaggattgaaggccaaaccaaaatttacattaggaaaacgaaaagctacacccaccacctcatctacctctacaactgctaaacgcaaaaaacgtaagctgtaagtattgtatgtatgttgaattagtgttgtttgttgtgtatatgtttgtatgtgcttgtatgtgcttgtaaatattaagttgtatgtgtgtttgtatgtatggtataataaacacgtgtgtatgtgtttttaaatgcttgtgtaactattgtgtcatgcaacataaataaacttattgtttcaacacctactaattgtgttgtggttattcattgtatataaactatatttgctacatcctgtttttgttttatatatactatattttgtagcgccagcggccattttgtagcttcaaccgaattcggttgcatgctttttggcacaaaatgtgtttttttaaatagttctatgtcagcaactatagtttaaacttgtacgtttcctgcttgccatgcgtgccaaatccctgttttcctgacctgcactgcttgccaaccattccattgttttttacactgcactatgtgcaactactgaatcactatgtacattgtgtcatataaaataaatcactatgcgccaacgccttacataccgctgttaggcacatatttttggcttgttttaactaacctaattgcatatttggcataaggtttaaacttctaaggccaactaaatgtcaccctagttcatacatgaactgtgtaaaggttagtcatacattgttcatttgtaaaactgcacatgggtgtgtgcaaaccgttttgggttacacatttacaagcaacttatataataatactaaactacaataattcatgtataaaactaagggcgtaaccgaaatcggttgaaccgaaaccggttagtataaaagcagacattttatgcaccaaaagagaactgcaatgtttcaggacccacaggagcgacccagaaagttaccacagttatgcacagagctgcaaacaactatacatgatataatattagaatgtgtgtactgcaagcaacagttactgcgacgtgaggtatatgactttgcttttcgggatttatgcatagtatatagagatgggaatccatatgctgtatgtgataaatgtttaaagttttattctaaaattagtgagtatagacattattgttatagtgtgtatggaacaacattagaacagcaatacaacaaaccgttgtgtgatttgttaattaggtgtattaactgtcaaaagccactgtgtcctgaagaaaagcaaagacatctggacaaaaagcaaagattccataatataaggggtcggtggaccggtcgatgtatgtcttgttgcagatcatcaagaacacgtagagaaacccagctgtaatcatgcatggagatacacctacattgcatgaatatatgttagatttgcaaccagagacaactgatctctactgttatgagcaattaaatgacagctcagaggaggaggatgaaatagatggtccagctggacaagcagaaccggacagagcccattacaatattgtaaccttttgttgcaagtgtgactctacgcttcggttgtgcgtacaaagcacacacgtagacattcgtactttggaagacctgttaatgggcacactaggaattgtgtgccccatctgttctcagaaaccataatctacc

SEQ ID NO: 50 - DNA, 7906 bp, Homo sapiens
  source 1..7906: mol_type = genomic DNA; note = UNCseq2032
atggctgatcctgcaggtaccaatggggaagagggtacgggatgtaatggatggttttatgtagaggctgtagtggaaaaaaaaacaggggatgctatatcagatgacgagaacgaaaatgacagtgatacaggtgaagatttggtagattttatagtaaatgataatgattatttaacacaggcagaaacagagacagcacatgcgttgtttactgcacaggaagcaaaacaacatagagatgcagtacaggttctaaaacgaaagtatttgggtagtccacttagtgatattagtggatgtgtagacaataatattagtcctagattaaaagctatatgtatagaaaaacaaagtagagctgcaaaaaggagattatttgaaagcgaagacagcgggtatggcaatactgaagtggaaactcagcagatgttacaggtagaagggcgccatgagactgaaacaccatgtagtcagtatagtggtggaagtgggggtggttgcagtcagtacagtagtggaagtgggggagagggtgttagtgaaagacacactatatgccaaacaccacttacaaatattttaaatgtactaaaaactagtaatgcaaaggcagcaatgttagcaaaatttaaagagttatacggggtgagtttttcagaattagtaagaccatttaaaagtaataaatcaacgtgttgcgattggtgtattgctgcattcggacttacacccagtatagctgacagtataaaaacactattacaacaatattgtttatatttacacattcaaagtttagcatgttcatggggaatggttgtgttactattagtaagatataaatgtggaaaaaatagagaaacaattgaaaaattgctgtctaaactattatgtgtgtctccaatgtgtatgatgatagagcctccaaaattgcgtagtacagcagcagcattatattggtataaaacaggtatatcaaatattagtgaagtgtatggagacacgccagaatggatacaaagacaaacagtattacaacatagttttaatgattgtacatttgaattatcacagatggtacaatgggcctacgataatgacatagtagacgatagtgaaattgcatataaatatgcacaattggcagacactaatagtaatgcaagtgcctttctaaaaagtaattcacaggcaaaaattgtaaaggattgtgcaacaatgtgtagacattataaacgagcagaaaaaaaacaaatgagtatgagtcaatggataaaatatagatgtgatagggtagatgatggaggtgattggaagcaaattgttatgtttttaaggtatcaaggtgtagagtttatgtcatttttaactgcattaaaaagatttttgcaaggcatacctaaaaaaaattgcatattactatatggtgcagctaacacaggtaaatcattatttggtatgagtttaatgaaatttctgcaagggtctgtaatatgttttgtaaattctaaaagccatttttggttacaaccattagcagatgccaaaataggtatgttagatgatgctacagtgccctgttggaactacatagatgacaatttaagaaatgcattggatggaaatttagtttctatggatgtaaagcatagaccattggtacaactaaaatgccctccattattaattacatctaacattaatgctggtacagattctaggtggccttatttacataatagattggtggtgtttacatttcctaatgagtttccatttgacgaaaacggaaatccagtgtatgagcttaatgataagaactggaaatcctttttctcaaggacgtggtccagattaagtttgcacgaggacgaggacaaggaaaacgatggagactctttgccaacgtttaaatgtgtgtcaggacaaaatactaacacattatgaaaatgatagtacagacctacgtgaccatatagactattggaaacaaatgcgcctagaatgtgctatttattacaaggccagagaaatgggatttaaacatattaaccaccaggtggtgccaacactggctgtatcaaagaataaagcattacaagcaattgaactgcaactaacgttagaaacaatatataactcacaatatagtaatgaaaagtggacattacaagacgttagccttgaagtgtatttaactgcaccaacaggatgtataaaaaaacatggatatacagtggaagtgcagtttgatggagacatatgcaatacaatgcattatacaaactggacacatatatatatttgtgaagaagcatcagtaactgtggtagagggacaagttgactattatggtttatattatgttcatgaaggaatacgaacatattttgtgcagtttaaagatgatgcagaaaaatatagtaaaaataaagtatgggaagttcatgcgggtggtcaggtaatattatgtcctacatctgtgtttagcagcaacgaagtatcctctcctgaaattattaggcagcacttggccaaccaccccgccgcgacccataccaaagccgtcgccttgggcaccgaagaaacacagacgactatccagcgaccaagatcagagccagacaccggaaacccctgccacaccactaagttgttgcacagagactcagtggacagtgctccaatcctcactgcatttaacagcgcacacaaaggacggattaactgtaatagtaacactacacccatagtacatttaaaaggtgatgctaatactttaaaatgtttaagatatagatttaaaaagcattgtacattgtatactgcagtgtcgtctacatggcattggacaggacataatgtaaaacataaaagtgcaattgttacacttacatatgatagtgaatggcaacgtgaccaatttttgtctcaagttaaaataccaaaaactattacagtgtctactggatttatgtctatatgacaaatcttgatactgcatccacaacattactggcgtgctttttgctttgcttttgtgtgcttttgtgtgtctgcctattaatacgtccgctgcttttgtctgtgtctacatacacatcattaataatattggtattactattgtggataacagcagcctctgcgtttaggtgttttattgtatatattatatttgtttatataccattatttttaatacatacacatgcacgctttttaattacataatgtatatgtacataatgtaattgttacatataattgttgtataccataacttactattttttcttttttattttcatatataatttttttttttgtttgtttgtttgttttttaataaactgttatcacttaacaatgcgacacaaacgttctgcaaaacgcacaaaacgtgcatcggctacccaactttataaaacatgcaaacaggcaggtacatgtccacctgacattatacctaaggttgaaggcaaaactattgctgatcaaatattacaatatggaagtatgggtgtattttttggtgggttaggaattggcacagggtcgggtacaggcggacgcactgggtatattccattgggaacaaggcctcccacagctacagatacacttgctcctgtaagaccccctttaacagtagatcctgtgggcccttctgatccttctatagtttctttagtggaagaaactagttttattgatgctggtgcaccaacatctgtaccttccattcccccagatgtatcaggatttagtattactacttcaactgataccacacctgctatattagatattaataatactgttactactgttactacacataataatcccactttcactgacccatctgtattgcagcctccaacacctgcagaaactggagggcattttacactttcatcatccactattagtacacataattatgaagaaattcctatggatacatttattgttagcacaaaccctaacacagtaactagtagcacacccataccagggtctcgcccagtggcacgcctaggattatatagtcgcacaacacaacaagttaaagttgtagaccctgcttttgtaaccactcccactaaacttattacatatgataatcctgcatatgaaggtatagatgtggataatacattatatttttctagtaatgataatagtattaatatagctccagatcctgactttttggatatagttgctttacataggccagcattaacctctaggcgtactggcattaggtacagtagaattggtaataaacaaacactacgtactcgtagtggaaaatctataggtgctaaggtacattattattatgatttcagtactattgatcctgcagaagaaatagaattacaaactataacaccttctacatatactaccacttcacatgcagcctcacctacttctattaataatggattatatgatatttatgcagatgactttattacagatacttctacaaccccggtaccatctgcaccctctacatctttatcaggttatattcctgcaaatacaacaattccttttggtggtgcatacaatattcctttagtatcaggtcctgatatacccattaatataactgaccaagctccttcattaattcctatagttccagggtctccacaatatacaattattgctgatgcaggtgacttttatttacatcctagttattacatgttacgaaaacgacgtaaacgtttaccatattttttttcagatgtctctttggctgcctagtgaggccactgtctacttgcctcctgtcccagtatctaaggttgtaagcacggatgaatatgttgcacgcacaaacatatattatcatgcaggaacatccagactacttgcagttggacatccctattttcctattaaaaaacctaacaataacaaaatattagttcctaaagtatcaggattacaatacagggtatttagaatacatttacctgaccccaataagtttggttttcctgacacctcattttataatccagatacacagcggctggtttgggcctgtgtaggtgttgaggtaggtcgtggtcagccattaggtgtgggcattagtggccatcctttattaaataaattggatgacacagaaaatgctagtgcttatgcagcaaatgcaggtgtggataatagagaatgtatatctatggattacaaacaaacacaattgtgtttaattggttgcaaaccacctataggggaacactggggcaaaggatccccatgtaccaatgttgcagtaaatccaggtgattgtccaccattagagttaataaacacagttattcaggatggtgatatggttgatactggctttggtgctatggactttactacattacaggctaacaaaagtgaagttccactggatatttgtacatctatttgcaaatatccagattatattaaaatggtgtcagaaccatatggcgacagcttatttttttatttacgaagggaacaaatgtttgttagacatttatttaatagggctggtactgttggtgaaaatgtaccagacgatttatacattaaaggctctgggtctactgcaaatttagccagttcaaattattttcctacacctagtggttctatggttacctctgatgcccaaatattcaataaaccttattggttacaacgagcacagggccacaataatggcatttgttggggtaaccaactatttgttactgttgttgatactacacgcagtacaaatatgtcattatgtgctgccatatctacttcagaaactacatataaaaatactaactttaaggagtacctacgacatggggaggaatatgatttacagtttatttttcaactgtgcaaaataaccttaactgcagacgttatgacatacatacattctatgaattccactattttggaggactggaattttggtctacaacctcccccaggaggcacactagaagatacttataggtttgtaacatcccaggcaattgcttgtcaaaaacatacacctccagcacctaaagaagatccccttaaaaaatacactttttgggaagtaaatttaaaggaaaagttttctgcagacctagatcagtttcctttaggacgcaaatttttactacaagcaggattgaaggccaaaccaaaatttacattaggaaaacgaaaagcgacacccaccacctcatctacctctacaactgctaaacgcaaaaaacgtaagctgtaagtattgtatgtatgttgaattagtgttgtttgttgtgtatatgtttgtatgtgcttgtatgtgcttgtaaatattaagttgtatgtgtgtttgtatgtatggtataataaacacgtgtgtatgtgtttttaaatgcttgtgtaactattgtgtcatgcaacataaataaacttattgtttcaacacctactaattgtgttgtggttattcattgtatatacactatatttgctacatcctgtttttgttttatatatactatattttgtagcgccagcggccattttgtagcttcaaccgaattcggttgcatgctttttggcacaaattgtgtttttttaaatagttctatgtcagcaactatggtttaaacttgtacgtttcctgcttgccatgcgtgccaaatccctgttttcctgacctgcactgcttgccaaccattccattgttttttacactgcactatgtgcaactactgaatcactatgtacattgtgtcatataaaataaatcactatgcgccaacgccttacataccgctgttaggcacatatttttggcttgttttaactaacctaattgcatatttggcataaggtttaaacttctaaggccaactaaatgtcaccctagttcatacatgaactgtgtaaaggttagtcatacattgttcatttgtaaaactgcacatgggtgtgtgcaaaccgttttgggttacacatttacaagcaacttatataataatactaaactacaataattcatgtataaaactaagggcgtaaccgaaatcggttgaaccgaaaccggttagtataaaagcagacattttatgcaccaaaagagaactgcaatgtttcaggacccacaggagcgacccagaaagttaccacagttatgcacagagctgcaaacaactatacatgatataatattagaatgtgtgtactgcaagcaacagttactgcgacgtgaggtatatgactttgcttttcgggatttatgcatagtatatagagatgggaatccatatgctgtatgtgataaatgtttaaagttttattctaaaattagtgagtatagacattattgttatagtttgtatggaacaacattagaacagcaatacaacaaaccgttgtgtgatttgttaattaggtgtattaactgtcaaaagccactgtgtcctgaagaaaagcaaagacatctggacaaaaagcaaagattccataatataaggggtcggtggaccggtcgatgtatgtcttgttgcagatcatcaagaacacgtagagaaacccagctgtaatcatgcatggagatacacctacattgcatgaatatatgttagatttgcaaccagagacaactgatctctactgttatgagcaattaaatgacagctcagaggaggaggatgaaatagatggtccagctggacaagcagaaccggacagagcccattacaatattgtaaccttttgttgcaagtgtgactctacgcttcggttgtgcgtacaaagcacacacgtagacattcgtactttggaagacctgttaatgggcacactaggaattgtgtgccccatctgttctcagaaaccataatctacc

SEQ ID NO: 51 - DNA, 7906 bp, Homo sapiens
  source 1..7906: mol_type = genomic DNA; note = UNCseq2033
atggctgatcctgcaggtaccaatggggaagagggtacgggatgtaatggatggttttatgtagaggctgtagtggaaaaaaaaacaggggatgctatatcagatgacgagaacgaaaatgacagtgatacaggtgaagatttggtagattttatagtaaatgataatgattatttaacacaggcagaaacagagacagcacatgcgttgtttactgcacaggaagcaaaacaacatagagatgcagtacaggttctaaaacgaaagtatttgggtagtccacttagtgatattagtggatgtgtagacaataatattagtcctagattaaaagctatatgtatagaaaaacaaagtagagctgcaaaaaggagattatttgaaagcgaagacagcgggtatggcaatactgaagtggaaactcagcagatgttacaggtagaagggcgccatgagactgaaacaccatgtagtcagtatagtggtggaagtgggggtggttgcagtcagtacagtagtggaagtgggggagagggtgttagtgaaagacacactatatgccaaacaccacttacaaatattttaaatgtactaaaaactagtaatgcaaaggcagcaatgttagcaaaatttaaagagttatacggggtgagttttacagaattagtaagaccatttaaaagtaataaatcaacgtgttgcgattggtgtattgctgcatttggacttacacccagtatagctgacagtataaaaacactattacaacaatattgtttatatttacacattcaaagtttagcatgttcatggggaatggttgtgttactattagtaagatataaatgtggaaaaaatagagaaacaattgaaaaattgctgtctaaactattatgtgtgtctccaatgtgtatgatgatagagcctccaaaattgcgtagtacagcagcagcattatattggtataaaacaggtatatcaaatattagtgaagtgtatggagacacgccagaatggatacaaagacaaacagtattacaacatagttttaatgattgtacatttgaattatcacagatggtacaatgggcctacgataatgacatagtagacgatagtgaaattgcatataaatatgcacaattggcagacactaatagtaatgcaagtgcctttctaaaaagtaattcacaggcaaaaattgtaaaggattgtgcaacaatgtgtagacattataaacgagcagaaaaaaaacaaatgagtatgagtcaatggataaaatatagatgtgatagggtagatgatggaggtgattggaagcaaattgttatgtttttaaggtatcaaggtgtagagtttatgtcatttttaactgcattaaaaagatttttgcaaggcatacctaaaaaaaattgcatattactatatggtgcagctaacacaggtaaatcattatttggtatgagtttaatgaaatttctgcaagggtctgtaatatgttttgtaaattctaaaagccatttttggttacaaccattagcagatgccaaaataggtatgttagatgatgctacagtgccctgttggaactacatagatgacaatttaagaaatgcattggatggaaatttagtttctatggatgtaaagcatagaccattggtacaactaaaatgccctccattattaattacatctaacattaatgctggtacagattctaggtggccttatttacataatagattggtggtgtttacatttcctaatgagtttccatttgacgaaaacggaaatccagtgtatgagcttaatgataagaactggaaatcctttttctcaaggacgtggtccagattaagtttgcacgaggacgaggacaaggaaaacgatggagactctttgccaacgtttaaatgtgtgtcaggacaaaatactaacacattatgaaaatgatagtacagacctacgtgaccatatagactattggaaacacatgcgcctagaatgtgctatttattacaaggccagagaaatgggatttaaacatattaaccaccaggtggtgccaacgctggctgtatcaaagaataaagcattacaagcaattgaactgcaactaacgttagaaacaatatataactcacaatatagtaatgaaaagtggacattacaagacgttagccttgaagtgtatttaactgcaccaacaggatgtataaaaaaacatggatatacagtggaagtgcagtttgatggagacatatgcaatacaatgcattatacaaactggacacatatatatatttgtgaagaagcatcagtaactgtggtagagggtcaagttgactattatggtttatattatgttcatgaaggaatacgaacatattttgtgcagtttaaagatgatgcagaaaaatatagtaaaaataaagtatgggaagttcatgcgggtggtcaggtaatattatgtcctacatctgtgtttagcagcaacgaagtatcctctcctgaaactattaggcagcacttggccaaccaccccgccgcgacccataccaaagccgtcgccttgggcaccgaagaaacacagacgactatccagcgaccaagatcagagccagacaccggaaacccctgccacaccactaagttgttgcacagagactcagtggacagtgctccaatcctcactgcatttaacagctcacacaaaggacggattaactgtaatagtaacactacacccatagtacatttaaaaggtgatgctaatactttaaaatgtttaagatatagatttaaaaagcattgtaaattgtatactgcagtgtcgtctacatggcattggacaggacataatgtaaaacataaaagtgcaattgttacacttacatatgatagtgaatggcaacgtgaccaatttttgtgtcaagttaaaataccaaaaactattacagtgtctactggatttatgtctatatgacaaatcttgatactgcatccacaacattactggcgtgctttttgctttgcttttgtgtgcttttgtgtgtctgcctattaatacgtccgctgcttttgtctgtgtctacatacacatcattaatactattggtattactattgtggataacagcagcctctgcgtttaggtgttttattgtatatattgtatttgtttatataccattatttttaatacatacacatgcacgctttttaattacataatgtatatgtacataatgtaattgttacatataattgttgtataccataacttactattttttcttttttatttttatatataatttttttttttgtttgtttgtttgttttttaataaactgttatcacttaacaatgcgacacaaacgttctgcaaaacgcacaaaacgtgcatcggctacccaactttataaaacatgcaaacaggcaggtacatgtccacctgacattatacctaaggttgaaggcaaaactattgctgatcaaatattacaatatggaagtatgggtgtattttttggtgggttaggaattggaacagggtcgggtacaggcggacgcactgggtatattccattgggaacaaggcctcccacagctacagatacacttgctcctgtaagaccccctttaacagtagatcctgtgggcccttctgatccttctatagtttctttagtggaagaaactagttttattgatgctggtgcaccaacatctgtaccttccatccccccagatgtatcaggatttagtattactacttcaactgataccacacctgctatattggatattaataatactgttactactgttactacacataataatcccactttcactgacccatctgtattgcagcctccaacacctgcagaaactggagggcattttacactttcatcatccactattagtacacataattatgaagaaattcctatggatacatttattgttagcacaaaccctaacacagtaactagtagcacacccataccagggtctcgcccagtggcacgcctaggattatatagtcgcacaacacaacaagttaaagttgtagaccctgcttttgtaaccactcccactaaacttattacatatgataatcctgcatatgaaggtatagatgtggataatacattatattttcctagtaatgataatagtattaatatagctccagatcctgactttttggatatagttgctttacataggccagcattaacctctaggcgtactggcattaggtacagtagaattggtaataaacaaacactacgtactcgtagtggaaaatctataggtgctaaggtacattattattatgatttgagtactattgatcctgcagaagaaatagaattacaaactataacaccttctacatatactaccacttcacatgcagcctcacctacttctattaataatggattatatgatatttatgcagatgactttattacagatacttctacaaccccggtaccatctgtaccctctacatctttatcaggttatattcctgcaaatacaacaattccttttggtggtgcatacaatattcctttagtatcaggtcctgatatacccattaatataactgaccaagctccttcattaattcctatagttccagggtctccacaatatacaattattgctgatgcaggtgacttttatttacatcctagttattacatgttacgaaaacgacgtaaacgtttaccatattttttttcagatgtctctttggctgcctagtgaggccactgtctacttgcctcctgtcccagtatctaaggttgtaagcacggatgaatatgttgcacgcacaaacatatattatcatgcaggaacatccagactacttgcagttggacatccctattttcctattaaaaaacctaacaataacaaaatattagttcctaaagtatcaggattacaatacagggtatttagaatacatttacctgaccccaataagtttggttttcctgacacctcattttataatccagatacacagcggctggtttgggcctgtgtaggtgttgaggtaggtcgtggtcagccattaggtgtgggcattagtggccatcctttattaaataaattggatgacacagaaaatgctagtgcttatgcagcaaatgcaggtgtggataatagagaatgtatatctatggattacaaacaaacacaattgtgtttaattggttgcaaaccacctataggggaacactggggcaaaggatccccatgtaccaatgttgcagtaaatccaggtgattgtccaccattagagttaataaacacagttattcaggatggtgatatggttgatactggctttggtgctatggactttactacattacaggctaacaaaagtgaagttccactggatatttgtacatctatttgcaaatatccagattatattaaaatggtgtcagaaccatatggcgacagcttatttttttatttacgaagggaacaaatgtttgttagacatttatttaatagggctggtgctgttggtgaaaatgtaccagacgatttatacattaaaggctctgggtctactgcaaatttagccagttcaaattattttcctacacctagtggttctatggttacctctgatgcccaaatattcaataaaccttattggttacaacgagcacagggccacaataatggcatttgttggggtaaccaactatttgttactgttgttgatactacacgcagtacaaatatgtcattatgtgctgccatatctacttcagaaactacatataaaaatactaactttaaggagtacctacgacatggggaggaatatgatttacagtttatttttcaactgtgcaaaataaccttaactgcagacgttatgacatacatacattctatgaattccactattttggaggactggaattttggtctacaaccccccccaggaggcacactagaagatacttataggtttgtaacatcccaggcaattgcttgtcaaaaacatacacctccagcacctaaagaagatccccttaaaaaatacactttttgggaagtaaatttaaaggaaaagttttctgcagacctagatcagtttcctttaggacgcaaatttttactacaagcaggattgaaggccaaaccaaaatttacattaggaaaacgaaaagctacacccaccacctcatctacctctacaactgctaaacgcaaaaaacgtaagctgtaagtattgtatgtatgttgaattagtgttgtttgttgtttatatgtttgtatgtgcttgtatgtgcttgtaaatattaagttgtatgtgtgtttgtatgtatggtataataaacacgtgtgtatgtgtttttaaatgcttgtgtaactattgtgtgatgcaacataaataaacttattgtttcaacacctactaattgtgttgtggttattcattgtatataaactatatttgctacatcctgtttttgttttatatatactatattttgtagcgccagcggccattttgtagcttcaaccgaattcggttgcatgctttttggcacaaaatgtgtttttttaaatagttctatgtcagcaactatagtttaaacttgtacgtttcctgcttgccatgcgtgccaaatccctgttttcctgacctgcactgcttgccaaccattccattgttttttacactgcactatgtgcaactactgaatcactatgtacattgtgtcatataaaataaatcactatgcgccaacgccttacataccgctgttaggcacatatttttggcttgttttaactaacctaattgcatatttggcataaggtttaaacttctaaggccaactaaatgtcaccctagttcatacatgaactgtgtaaaggttagtcatacattgttcatttgtaaaactgcacatgggtgtgtgcaaaccgttttgggttacacatttacaagcaacttatataataatactaaactacaataattcatgtataaaactaagggcgtaaccgaaatcggttgaaccgaaaccggttagtataaaagcagacattttatgcaccaaaagagaactgcaatgtttcaggacccacaggagcgacccggaaagttaccacagttatgcacagagctgcaaacaactatacatgatataatattagaatgtgtgtactgcaagcaacagttactgcgacgtgaggtatatgactttgcttttcgggatttatgcatagtatatagagatgggaatccatatgctgtatgtgataaatgtttaaagttttattctaaaattagtgagtatagacattattgttatagtgtgtatggaacaacattagaacagcaatacaacaaaccgttgtgtgatttgttaattaggtgtattaactgtcaaaagccactgtgtcctgaagaaaagcaaagacatctggacaaaaagcaaagattccataatataaggggtcggtggaccggtcgatgtatgtcttgttgcagatcatcaagaacacgtagagaaacccagctgtaatcatgcatggagatacacctacattgcatgaatatatgttagatttgcaaccagagacaactgatctctactgttatgagcaattaaatgacagctcagaggaggaggatgaaatagatggtccagctggacaagcagaaccggacagagcccattacaatattgtaaccttttgttgcaagtgtgactctacgcttcggttgtgcgtacaaagcacacacgtagacattcgtactttggaagacctgttaatgggcacactaggaattgtgtgccccatctgttctcagaaaccataatctacc

SEQ ID NO: 52 - DNA, 7906 bp, Homo sapiens
  source 1..7906: mol_type = genomic DNA; note = UNCseq2051
atggctgatcctgcaggtaccaatggggaagagggtacgggatgtaatggatggttctatgtagaggctgtagtggaaaaaaaaacaggggatgctatatcagatgacgagaacgaaaatgacagtgatacaggtgaagatttggtagattttatagtaaatgataatgattatttgacacaggcagaaacagagacagcacatgcgttgtttactgcacaggaagcaaaagaacatagagatgcagtacaggttctaaaacgaaagtatttgggtagtccacttagtgatattagtgaatgtgtagacaataatattagtcctagattaaaagccatatgtatagaaaaacaaagtagagctgcaaaaaggagattatttgaaagcgaagacagcgggtatggcaatactgaagtggaaactcagcagatgttacaggtagaagggcgccatgagactgaaacaccatgtagtcagtatagtggtggaagtgggggtggtagcagtcagtatagtagtggaagtgggggagagggtgttagtgaaagacacactatatgcgaaacaccacttacaaatattttaaatgtactaaaaactagtaatgcaaaggcagcaatgctagcaaaatttaaagagttatacggggtgagttttacagaattagtaagaccatttaaaagtaataaatcaacgtgttgcgattggtgtattgctgcatttggacttacacccagtatagctgacagtataaaaacattattacaacaatattgtttatatttacacattcaaagtttagcgtgttcatggggaatggttgtgttactattagtaagatataaatgtggaaaaaatagagaaacaattgaaaaattgatgtctaaactattatgtgtgtctccaatgtgtatgatgatagagcctccaaaattgcgtagtacagcagcagcattatattggtataaaacaggtatgtcaaatattagtgaagtgtatggagacacgccagaatggatacaaagacaaacagtattacaacatagttttaatgattgtacatttgaattatcacagatggtacaatgggcctacgataatgacatagtagacgatagtgaaattgcatataaatatgcacaattggcagacactaatagtaatgcaagtgcctttttaaaaagtaattcacaggcaaaaattgtaaaggattgtgcaacaatgtgtagacattataaacgagcagaaaaaaaacaaatgagtatgagtcaatggataaaatatagatgtgatagggtagatgatggaggtgattggaagcaaattgttatgtttttaaggtatcaaggtgtagactttatgtcatttttaagtgcattaaaaaaatttctgcaaggtatacctaaaaaaaattgcatattattatatggtgcagctaacacaggtaaatcattatttggtatgagtttaatgaaattcttgcaagggtctgtaatatgttttgtaaattctaaaagccatttttggttacaaccattagcagatgccaaaataggtatgttagatgatgctacagtgccctgttggaactacatagatgacaatttaagaaatgcattggatggaaatttagtttctatggatgtaaagcatagaccattggtacaactaaaatgccctccattattaattacatctaacattaatgctggtacagattccaggtggccttatttacataatcgattggtggtgtttacatttccaaatgagtttccatttgacaaaaacggaaatccagtgtatgagcttaatgataagaactggaaatcctttttctcaaggacgtggtccagattaagtttgcacgaggacgaggacaaggaaaacgatggagactctttgccaacgtttaaatgtgtgtcaggacaaaatactaacacattatgaaaatgatagtacagacctacgtgaccatatagactattggaaacacatgcgcctagaatgtgctatttattacaaggccagagaaatgggatttaaacatattaaccaccaggtggtgccaacactggctgtatcaaagaataaagcattacaagcaattgaactgcaactaacgttagaaacaatatataactcacaatatagtaatgaaaagtggacattacaagacgttagccttgaagtgtatttaactgcaccaacaggatgtataaaaaaacatggatatacagtggaagtgcagtttgatggagacatatgcaatacaatgcattatacaaactggaaacatatatatatttgtgaagacacatcagtaactgtggtagagggtcaagttgactattatggtatatattatgttcatgaaggaatacaaacatattttgtgcagtttaaagatgatgcagaaaaatatagtaaaaataaagtatgggaagttcatgcgggtggtcaggtaatattatgtcctacatctgtgtttagcagcgacgaagtatcctctcctgaaattactaggcagcacttggccaaccactccgccgcgacccataccaaagccgtcgccttgggcaccaaagaaacacagacgactatccagcgaccaagatcagagccagacaccggaaacccctgccacaccaccaagttgttgcacagagactcagtggacagtgctccaatcctcactgcagttaacagctcacacaaaggacggattaactgtaatagtaacactacacccatagtacatttaaaaggtgatgctaatactttaaaatgtttaagatacagatttaaaaagcattgtaaattgtatacagcagtgtcgtccacatggcattggacaggacataatgtaaaacataaaagtgcaattgttacacttacatatgatagtgaatgtcaacgtgaccaatttttgtctcaagtgaaaataccaaaaactattacagtgtctactggatttatgtctatatgacaaaccttgatactgcatccacaacattactggcgtgctttttgctttgcttttgtgtgcttttgtgtgtctgcctattaatacgtccgctgcttttgtctgtgtctacatacacatcattaatactattggtattagtattgtggataacagcagcctctgcatttaggtgttttattgtatatattatatttgtttatataccattatttttaatacatacacatgcacgcttcttaattacataatgtatatgtacataatgtaattgttacatataattgttgtataccataaattactatttttttttttttattttcatatataatttttttttttgtttatttgtgtgttttttaataaactgttattacttaacaatgcgacacaaacgttctgcaaaacgcacaaaacgtgcatcggccacccaactttataaaacatgcaaacaggcaggtacatgtccacctgacattatacctaaggttgaaggcaaaactattgctgatcaaatattacaatatggaagtatgggtgtattttttggtgggttaggaattggaacagggtcgggtacaggcggacgcactgggtacattccattaggaacaaggcctcccactgctacagatacacttgctcctgtaagaccccctttaacagtagatcctgtgggcccttctgatccttctatagtttctttagtggaagaaactagttttattgatgctggtgcaccaacccctgtaccttccattcccccagatgtatcaggatttagtattacaacttcaactgataccacacctgctatattagatattaataatactgttactactgttactacacataataatcccacttttactgacccatctgtattgcagcctccaacacctgcagaaactggagggcattttacactttcatcatccactattagtacacataattatgaagaaattcctatggatacatttattgttagcacaaaccctaacacagtaactagtagcacacccataccggggtctcgcccagtggcacgcctaggattatatagtcgcacaacacaacaagttaaggttgtggaccctgcttttgtaaccgctcccactaaacttattacatatgataatcctgcatatgaaggtatagatgtggataatacattttattttcctagtaatgataatagtattaatatagctccagatcctgactttttggatatagttgctttacataggccagcattaacctctaggcgtactggcattagatacagtagaattggtaataaacaaacactacgtactcgtagtggaaaatctataggtgctaaggtacattattattatgatttaagtactattaatcctgcagaagaaatagaattacaaactataacaccttctacatatacaaccacttcccatgcagcctcaccaacttctattaataatggattatatgatatttatgcagatgactttattacagatactgttacaaccccagtaccagctataccctctacatccttatcaggttatattcctgcaaatacaacaattccttttggtggtgcatacaatattcctttagtatcaggacctgatatacctattaatacaactgaccaaactccttcattaattcctatagttccagggtctccacaatatacaattattgctgatggaggtgacttttatttacatcctagttattacatgttacgaaaacgacgtaaacgtttaccatattttttttcagatgtctctttggctgcctagtgaggccactgtctacttgcctcctgtcccagtatctaaagttgtaagcacggatgaatatgttgcacgcacaaacatatattatcatgcaggaacatccagactacttgcagttggacatccctattttcctattaaaaaacctaacaataacaaaatattagttcctaaagtatcaggattacaatacagggtatttagaatacatttacctgaccccaataagtttggttttcctgacacctcattttacaatccagatacacagcggctggtttgggcctgtgtaggtgttgaggtaggtcgtggtcagccattaggtgtgggcattagtggccatcctttattaaataaattggatgacacagaaaatgctagtgcttatgcagcaaatgcaggtgtggataatagagaatgtatatctatggattacaaacaaacacaattgtgtttaattggttgcaaaccacctataggggaacactggggcaaaggatccccatgtaacaatgttgcagtaactccaggtgattgtccaccattagagttaataaacacagttattcaggatggtgatatggttgataccggctttggtgctatggactttactacattacaggctaacaaaagtgaagttccactggatatttgtacatctatttgcaaatatccagattatattaaaatggtgtcagaaccatatggcgacagcttatttttttatttacgaagggaacaaatgtttgttagacatttatttaatagggctggtactgttggtgaaaatgtaccagacgatttatacattaaaggctctgggtctactgcaaatttagccagttcaaattattttcctacacctagtggttctatggttacctctgatgcccaaatatttaataaaccttattggttacaacgagcacagggccacaataatggcatttgttggggtaaccaactatttgttactgttgttgatactacacgcagtacaaatatgtcattatgtgctgccatatctacttcagaacctacatataaaaatactaactttaaagagtacctacgacatggggaggaatatgatttacagtttatttttcaactgtgcaaaataaccttaactgcagacgttatgtcatacatacattctatgaattccactattttggaggactggaattttggtttacaacctcctccaggaggcacactagaagatacttataggtttgtaacatcccaggcaattgcttgtcaaaaacatacacctccagcacctaaagaagatccccttaaaaaatatactttttgggaagtaaatttaaaagaaaagttttctgcagacctagatcagtttcctttaggacgcaaatttttactacaagcaggattgaaggccaaaccaaaatttacattaggaaaacgaaaagctacacccaccacctcatctacctctacaactgctaaacgcaaaaaacgtaagctgtaagtattgtatgtatgttgaattagtgttgtttgttgtttatatgtttgtatgtgcttgtatgtgcttgtaaatattacgttgtatgtgtgtttgtatgtatggtataataaacacgtgtgtatgtgtttttaaatgcttgtgtaactattgtgtcatgcaacataaataaacttattgtttcatcacctactaattgtgttgtggttattcattgtatataaactatatttgctacattttgtttttgttttatatatactatattttgtagcgccagcggccattttgtagcttcaaccgaattcggttgcatgctttttggcacaaactgtatttttttaaatagttctatgtcagcaactatagtttaaacttgtacgtttcctgcttgccatgcgtgccaaatccctgttttcctgacctgcactgcttgccaaccattccattgttttttacactgcactatgtgcaactactgaatcactatgtacattgtgtcatataaaataaattactatgcgccaacgccttaaataccgctgttaggcacatatttttggcttgttttaactcacctaattgcatagttggcataaggtttaaacttttaaggccaactaaatgtcaccttagttcatacatgaactgtgtaaaggttagtcatacattgttcatttgtaaaactgcacatgggtgtgtgcaaaccgttttgggttacacatttacaaggaacttatataataatagtaaactacaataattcatgtataaaactaagggcgtaaccgaaatcggttgaaccgaaaccggttagtataaaagcaaacattttatgcaccaaaagagaactgcaatgtttcaggacccacaggagcgacccagaaagttaccacatttatgcacagagctgcaaacaactatacatgatataatattagaatgtgtgtactgcaagcaacagttactgcgacgtgaggtatatgactttgcttttcgggatttatgcatagtatatagagatgggaatccatatgcagtgtgtgataaatgtttaaagttttattctaaaattagtgagtatagatattattgttatagtgtgtatggaacaacattagaacagcaatacaacaaaccgttgtgtgatttgttaattaggtgtattaactgtcaaaagccactgtgtcctgaagaaaagcaaagacatctggacaaaaagcaaagattccataatataaggggtcggtggaccggtcgatgtatgtcttgttgcagatcatcgagaacacgtagagaaacccagctgtaatcatgcatggagatacacctacattgcatgaatatatgttagatttgcaaccagagacaactgatctctactgttatgagcaattaaatgacagctcagaggaggaggatgaaatagatggtccagctggacaagcagaaccggacagagcccattacaatattgtaaccttctgttgcaagtgtgactctacgcttcggttgtgcgtacaaagcacacacgtagacatccgtacgttggaagacctgttaatgggcacactaggaattgtgtgccccatctgttctcagaaaccataatctacc

SEQ ID NO: 53 - DNA, 7906 bp, Homo sapiens
  source 1..7906: mol_type = genomic DNA; note = UNCseq2056
atggctgatcctgcaggtaccaatggggaagagggtacgggatgtaatggatggttttatgtagaggctgtagtggaaaaaaaaacaggggatgctatatcagatgacgagaacgaaaatgacagtgatacaggtgaagatttggtagattttatagtaaatgataatgattatttaacacaggcagaaacagagacagcacatgcgttgtttactgcacaggaagcaaaacaacatagagatgcagtacaggttctaaaacgaaagtatttgggtagtccacttagtgatattagtggatgtgtagacaataatattagtcctagattaaaagctatatgtatagaaaaacaaagtagagctgcaaaaaggagattatttgaaagcgaagacagcgggtatggcaatactgaagtggaaactcagcagatgttacaggtagaagggcgccatgagactgaaacaccatgtagtcagtatagtggtggaagtgggggtggttgcagtcagtacagtagtggaagtgggggagagggtgttagtgaaagacacactatatgccaaacaccacttacaaatattttaaatgtactaaaaactagtaatgcaaaggcagcaatgttagcaaaatttaaagagttatacggggtgagtttttcagaattagtaagaccatttaaaagtaataaatcaacgtgttgcgattggtgtattgctgcatttggacttacacccagtatagctgacagtataaaaacactattacaacaatattgtttatatttacacattcaaagtttagcatgttcatggggaatggttgtgttactattagtaagatataaatgtggaaaaaatagagaaacaattgaaaaattgctgtctaaactattatgtgtgtctccaatgtgtatgatgatagagcctccaaaattgcgtagtacagcagcagcattatattggtataaaacaggtatatcaaatattagtgaagtgtatggagacacgccagaatggatacaaagacaaacagtattacaacatagttttaatgattgtacatttgaattatcacagatggtacaatgggcctacgataatgacatagtagacgatagtgaaattgcatataaatatgcacaattggcagacactaatagtaatgcaagtgcctttctaaaaagtaattcacaggcaaaaattgtaaaggattgtgcaacaatgtgtagacattataaacgagcagaaaaaaaacaaatgagtatgagtcaatggataaaatatagatgtgatagggtagatgatggaggtgattggaagcaaattgttatgtttttaaggtatcaaggtgtagagtttatgtcatttttaactgcattaaaaagatttttgcaaggcatacctaaaaaaaattgcatattactatatggtgcagctaacacaggtaaatcattatttggtatgagtttaatgaaatttctgcaagggtctgtaatatgttttgtaaattctaaaagccatttttggttacaaccattagcagatgccaaaataggtatgttagatgatgctacagtgccctgttggaactacatagatgacaatttaagaaatgcattggatggaaatttagtttctatggatgtaaagcatagaccattggtacaactaaaatgccctccattattaattacatctaacattaatgctggtacagattctaggtggccttatttacataatagattggtggtgtttacatttcctaatgagtttccatttgacgaaaacggaaatccagtgtatgagcttaatgataagaactggaaatcctttttctcaaggacgtggtccagattaagtttgcacgaggacgaggacaaggaaaacgatggagactctttgccaacgtttaaatgtgtgtcaggacaaaatactaacacattatgaaaatgatagtacagacctacgtgaccatatagactattggaaacacatgcgcctagaatgtgctatttattacaaggccagagaaatgggatttaaacatattaaccaccaggtggtgccaacactggctgtatcaaagaataaagcattacaagcaattgaactgcaactaacgttagaaacaatatataactcacaatatagtaatgaaaagtggacattacaagacgttagccttgaagtgtatttaactgcaccaacaggatgtataaaaaaacatggatatacagtggaagtgcagtttgatggagacatatgcaatacaatgcattatacaaactggacacatatatatatttgtgaagaagcatcagtaactgtggtagagggtcaagttgactattatggtttatattatgttcatgaaggaatacgaacatattttgtgcagtttaaagatgatgcagaaaaatatagtaaaaataaagtatgggaagttcatgcgggtggtcaggtaatattatgtcctacatctgtgtttagcagcaacgaagtatcctctcctgaaattattaggcagcacttggccaaccaccccgccgcgacccataccaaagccgtcgccttgggcaccgaagaaacacagacgactatccagcgaccaagatcagagccagacaccggaaacccctgccacaccactaagttgttgcacagagactcagtggacagtgctccaatcctcactgcatttaacagctcacacaaaggacggattaactgtaatagtaacactacacccatagtacatttaaaaggtgatgctaatactttaaaatgtttaagatatagatttaaaaagcattgtacattgtatactgcagtgtcgtctacatggcattggacaggacataatgtaaaacataaaagtgcaattgttacacttacatatgatagtgaatggcaacgtgaccaatttttgtctcaagttaaaataccaaaaactattacagtgtctactggatttatgtctatatgacaaatcttgatactgcatccacaacattactggcgtgctttttgctttgcttttgtgtgcttttgtgtgtctgcctattaatacgtccgctgcttttgtctgtgtctacatacacatcattaataatattggtattactattgtggataacagcagcctctgcgtttaggtgttttattgtatatattatatttgtttatataccattatttttaatacatacacatgcacgctttttaattacataatgtatatgtacataatgtaattgttacatataattgttgtataccataacttactattttttcttttttattttcatatataatttttttttttgtttgtttgtttgttttttaataaactgttattacttaacaatgcgacacaaacgttctgcaaaacgcacaaaacgtgcatcggctacccaactttataaaacatgcaaacaggcaggtacatgtccacctgacattatacctaaggttgaaggcaaaactattgctgatcaaatattacaatatggaagtatgggtgtattttttggtgggttaggaattggaacagggtcgggtacaggcggacgcactgggtatattccattgggaacaaggcctcccacagctacagatacacttgctcctgtaagaccccctttaacagtagatcctgtgggcccttctgatccttctatagtttctttagtggaagaaactagttttattgatgctggtgcaccaacatctgtaccttccattcccccagatgtatcaggatttagtattactacttcaactgataccacacctgctatattagatattaataatactgttactactgttactacacataataatcccactttcactgacccatctgtattgcagcctccaacacctgcagaaactggagggcattttacactttcatcatccactattagtacacataattatgaagaaattcctatggatacatttattgttagcacaaaccctaacacagtaactagtagcacacccataccagggtctcgcccagtggcacgcctaggattatatagtcgcacaacacaacaggttaaagttgtagaccctgcttttgtaaccactcccactaaacttattacatatgataatcctgcatatgaaggtatagatgtggataatacattatatttttctagtaatgataatagtattaatatagctccagatcctgactttttggatatagttgctttacataggccagcattaacctctaggcgtactggcattaggtacagtagaattggtaataaacaaacactacgtactcgtagtggaaaatctataggtgctaaggtacattattattatgatttaagtactattgatcctgcagaagaaatagaattacaaactataacaccttctacatatactaccacttcacatgcagcctcacctacttctattaataatggattatatgatatttatgcagatgactttattacagatacttctacaaccccggtaccatctgtaccctctacatctttatcaggttatattcctgcaaatacaacaattccttttggtggtgcatacaatattcctttagtatcaggtcctgatatacccattaatataactgaccaagctccttcattaattcctatagttccagggtctccacaatatacaattattgctgatgcaggtgacttttatttacatcctagttattacatgttacgaaaacgacgtaaacgtttaccatattttttttcagatgtctctttggctgcctagtgaggccactgtctacttgcctcctgtcccagtatctaaggttgtaagcacggatgaatatgttgcacgcacaaacatatattatcatgcaggaacatccagactacttgcagttggacatccctattttcctattaaaaaacctaacaataacaaaatattagttcctaaagtatcaggattacaatacagggtatttagaatacatttacctgaccccaataagtttggttttcctgacacctcattttataatccagatacacagcggctggtttgggcctgtgtaggtgttgaggtaggtcgtggtcagccattaggtgtgggcattagtggccatcctttattaaataaattggatgacacagaaaatgctagtgcttatgcagcaaatgcaggtgtggataatagagaatgtatatctatggattacaaacaaacacaattgtgtttaattggttgcaaaccacctataggggaacactggggcaaaggatccccatgtaccaatgttgcagtaaatccaggtgattgtccaccattagagttaataaacacagttattcaggatggtgatatggttgatactggctttggtgctatggactttactacattacaggctaacaaaagtgaagttccactggatatttgtacatctatttgcaaatatccagattatattaaaatggtgtcagaaccatatggcgacagcttatttttttatttacgaagggaacaaatgtttgttagacatttatttaatagggctggtactgttggtgaaaatgtaccagacgatttatacattaaaggctctgggtctactgcaaatttagccagttcaaattattttcctacacctagtggttctatggttacctctgatgcccaaatattcaataaaccttattggttacaacgagcacagggccacaataatggcatttgttggggtaaccaactatttgttactgttgttgatactacacgcagtacaaatatgtcattatgtgctgccatatctacttcagaaactacatataaaaatactaactttaaggagtacctacgacatggggaggaatatgatttacagtttatttttcaactgtgcaaaataaccttaactgcagacgttatgacatacatacattctatgaattccactattttggaggactggaattttggtctacaacctcccccaggaggcacactagaagatacttataggtttgtaacatcccaggcaattgcttgtcaaaaacatacacctccagcacctaaagaagatccccttaaaaaatacactttttgggaagtaaatttaaaggaaaagttttctgcagacctagatcagtttcctttaggacgcaaatttttactacaagcaggattgaaggccaaaccaaaatttacattaggaaaacgaaaagctacacccaccacctcatctacctctacaactgctaaacgcaaaaaacgtaagctgtaagtattgtatgtatgttgaattagtgttgtttgttgtttatatgtttgtatgtgcttgtatgtgcttgtaaatattaagttgtatgtgtgtttgtatgtatggtataataaacacgtgtgtatgtgtttttaaatgcttgtgtaactattgtgtcatgcaacataaataaacttattgtttcaacacctactaattgtgttgtggttattcattgtatataaactatatttgctacatcctgtttttgttttatatatactatattttgtagcgccagcggccattttgtagcttcaaccgaattcggttgcatgctttttggcacaaaatgtgtttttttaaatagttctatgtcagcaactatggtttaaacttgtacgtttcctgcttgccatgcgtgccaaatccctgttttcctgacctgcactgcttgccaaccattccattgttttttacactgcactatgtgcaactactgaatcactatgtacattgtgtcatataaaataaatcactatgcgccaacgccttacataccgctgttaggcacatatttttggcttgttttaactaacctaattgcatatttggcataaggtttaaacttctaaggccaactaaatgtcaccctagttcatacatgaactgtgtaaaggttagtcatacattgttcatttgtaaaactgcacatgggtgtgtgcaaaccgttttgggttacacatttacaagcaacttatataataatactaaactacaataattcatgtataaaactaagggcgtaaccgaaatcggttgaaccgaaaccggttagtataaaagcagacattttatgcaccaaaagagaactgcaatgtttcaggacccacaggagcgacccagaaagttaccacagttatgcacagagctgcaaacaactatacatgatataatattagaatgtgtgtactgcaagcaacagttactgcgacgtgaggtatatgactttgcttttcgggatttatgcatagtatatagagatgggaatccatatgctgtatgtgataaatgtttaaagttttattctaaaattagtgagtatagacattattgttatagtttgtatggaacaacattagaacagcaatacaacaaaccgttgtgtgatttgttaattaggtgtattaactgtcaaaagccactgtgtcctgaagaaaagcaaagacatctggacaaaaagcaaagattccataatataaggggtcggtggaccggtcgatgtatgtcttgttgcagatcatcaagaacacgtagagaaacccagctgtaatcatgcatggagatacacctacattgcatgaatatatgttagatttgcaaccagagacaactgatctctactgttatgagcaattaaatgacagctcagaggaggaggatgaaatagatggtccagctggacaagcagaaccggacagagcccattacaatattgtaaccttttgttgcaagtgtgactctacgcttcggttgtgcgtacaaagcacacacgtagacattcgtactttggaagacctgttaatgggcacactaggaattgtgtgccccatctgttctcagaaaccataatctacc

SEQ ID NO: 54 - DNA, 7906 bp, Homo sapiens
  source 1..7906: mol_type = genomic DNA; note = UNCseq2083
atggctgatcctgcaggtaccaatggggaagagggtacgggatgtaatggatggttttatgtagaggctgtagtggaaaaaaaaacaggggatgctatatcagatgacgagaacgaaaatgacagtgatacaggtgaagatttggtagattttatagtaaatgataatgattatttaacacaggcagaaacagagacagcacatgcgttgtttactgcacaggaagcaaaacaacatagagatgcagtacaggttctaaaacgaaagtatttgggtagtccacttagtgatattagtggatgtgtagacaataatattagtcctagattaaaagctatatgtatagaaaaacaaagtagagctgcaaaaaggagattatttgaaagcgaagacagcgggtatggcaatactgaagtggaaactcagcagatgttacaggtagaagggcgccatgagactgaaacaccatgtagtcagtatagtggtggaagtgggggtggttgcagtcagtacagtagtggaagtgggggagagggtgttagtgaaagacacactatatgccaaacaccacttacaaatattttaaatgtactaaaaactagtaatgcaaaggcagcaatgttagcaaaatttaaagagttatacggggtgagttttacagaattagtaagaccatttaaaagtaataaatcaacgtgttgcgattggtgtattgctgcatttggacttacacccagtatagctgacagtataaaaacactattacaacaatattgtttatatttacacattcaaagtttagcatgttcatggggaatggttgtgttactattagtaagatataaatgtggaaaaaatagagaaacaattgaaaaattgctgtctaaactattatgtgtgtctccaatgtgtatgatgatagagcctccaaaattgcgtagtacagcagcagcattatattggtataaaacaggtatatcaaatattagtgaagtgtatggagacacgccagaatggatacaaagacaaacagtattacaacatagttttaatgattgtacatttgaattatcacagatggtacaatgggcctacgataatgacatagtagacgatagtgaaattgcatataaatatgcacaattggcagacactaatagtaatgcaagtgcctttctaaaaagtaattcacaggcaaaaattgtaaaggattgtgcaacaatgtgtagacattataaacgagcagaaaaaaaacaaatgagtatgagtcaatggataaaatatagatgtgatagggtagatgatggaggtgattggaagcaaattgttatgtttttaaggtatcaaggtgtagagtttatgtcatttttaactgcattaaaaagatttttgcaaggcatacctaaaaaaaattgcatattactatatggtgcagctaacacaggtaaatcattatttggtatgagtttaatgaaatttctgcaagggtctgtaatatgttttgtaaattctaaaagccatttttggttacaaccattagcagatgccaaaataggtatgttagatgatgctacagtgccctgttggaactacatagatgacaatttaagaaatgcattggatggaaatttagtttctatggatgtaaagcatagaccattggtacaactaaaatgccctccattattaattacatctaacattaatgctggtacagattctaggtggccttatttacataatagattggtggtgtttacatttcctaatgagtttccatttgacgaaaacggaaatccagtgtatgagcttaatgataagaactggaaatcctttttctcaaggacgtggtccagattaagtttgcacgaggacgaggacaaggaaaacgatggagactctttgccaacgtttaaatgtgtgtcaggacaaaatactaacacattatgaaaatgatagtacagacctacgtgaccatatagactattggaaacacatgcgcctagaatgtgctatttattacaaggccagagaaatgggatttaaacatattaaccaccaggtggtgccaacactggctgtatcaaagaataaagcattacaagcaattgaactgcaactaacgttagaaacaatatataactcacaatatagtaatgaaaagtggacattacaagacgttagccttgaagtgtatttaactgcaccaacaggatgtataaaaaaacatggatatacagtggaagtgcagtttgatggagacatatgcaatacaatgcattatacaaactggacacatatatatatttgtgaagaagcatcagtaactgtggtagagggtcaagttgactattatggtttatattatgttcatgaaggaatacgaacatattttgtgcagtttaaagatgatgcagaaaaatatagtaaaaataaagtatgggaagttcatgcgggtggtcaggtaatattatgtcctacatctgtgtttagcagcaacgaagtatcctctcctgaaattattaggcagcacttggccaaccaccccgccgcgacccataccaaagccgtcgccttgggcaccgaagaaacacagacgactatccagcgaccaagatcagagccagacaccggaaacccctgccacaccactaagttgttgcacagagactcagtggacagtgctccaatcctcactgcatttaacagctcacacaaaggacggattaactgtaatagtaacactacacccatagtacatttaaaaggtgatgctaatactttaaaatgtttaagatatagatttaaaaagcattgtacattgtatactgcagtgtcgtctacatggcattggacaggacataatgtaaaacataaaagtgcaattgttacacttacatatgatagtgaatggcaacgtgaccaatttttgtctcaagttaaaataccaaaaactattacagtgtctactggatttatgtctatatgacaaatcttgatactgcatccacaacattactggcgtgctttttgctttgcttttgtgtgcttttgtgtgtctgcctattaatacgtccgctgcttttgtctgtgtctacatacacatcattaataatattggtattactattgtggataacagcagcctctgcgtttaggtgttttattgtatatattatatttgtttatataccattatttttaatacatacacatgcacgctttttaattacataatgtatatgtacataatgtaattgttacatataattgttgtataccataacttactattttttcttttttattttcatatataatttttttttttgtttgtttgtttgttttttaataaactgttattacttaacaatgcgacacaaacgttctgcaaaacgcacaaaacgtgcatcggctacccaactttataaaacatgcaaacaggcaggtacatgtccacctgacattatacctaaggttgaaggcaaaactattgctgatcaaatattacaatatggaagtatgggtgtattttttggtgggttaggaattggaacagggtcgggtacaggcggacgcactgggtatattccattgggaacaaggcctcccacagctacagatacacttgctcctgtaagaccccctttaacagtagatcctgtgggcccttctgatccttctatagtttctttagtggaagaaactagttttattgatgctggtgcaccaacatctgtaccttccattcccccagatgtatcaggatttagtattactacttcaactgataccacacctgctatattagatattaataatactgttactactgttactacacataataatcccactttcactgacccatctgtattgcagcctccaacacctgcagaaactggagggcattttacactttcatcatccactattagtacacataattatgaagaaattcctatggatacatttattgttagcacaaaccctaacacagtaactagtagcacacccataccagggtctcgcccagtggcacgcctaggattatatagtcgcacaacacaacaggttaaagttgtagaccctgcttttgtaaccactcccactaaacttattacatatgataatcctgcatatgaaggtatagatgtggataatacattatatttttctagtaatgataatagtattaatatagctccagatcctgactttttggatatagttgctttacataggccagcattaacctctaggcgtactggcattaggtacagtagaattggtaataaacaaacactacgtactcgtagtggaaaatctataggtgctaaggtacattattattatgatttaagtactattgatcctgcagaagaaatagaattacaaactataacaccttctacatatactaccacttcacatgcagcctcacctacttctattaataatggattatatgatatttatgcagatgactttattacagatacttctacaaccccggtaccatctgtaccctctacatctttatcaggttatattcctgcaaatacaacaattccttttggtggtgcatacaatattcctttagtatcaggtcctgatatacccattaatataactgaccaagctccttcattaattcctatagttccagggtctccacaatatacaattattgctgatgcaggtgacttttatttacatcctagttattacatgttacgaaaacgacgtaaacgtttaccatattttttttcagatgtctctttggctgcctagtgaggccactgtctacttgcctcctgtcccagtatctaaggttgtaagcacggatgaatatgttgcacgcacaaacatatattatcatgcaggaacatccagactacttgcagttggacatccctattttcctattaaaaaacctaacaataacaaaatattagttcctaaagtatcaggattacaatacagggtatttagaatacatttacctgaccccaataagtttggttttcctgacacctcattttataatccagatacacagcggctggtttgggcctgtgtaggtgttgaggtaggtcgtggtcagccattaggtgtgggcattagtggccatcctttattaaataaattggatgacacagaaaatgctagtgcttatgcagcaaatgcaggtgtggataatagagaatgtatatctatggattacaaacaaacacaattgtgtttaattggttgcaaaccacctataggggaacactggggcaaaggatccccatgtaccaatgttgcagtaaatccaggtgattgtccaccattagagttaataaacacagttattcaggatggtgatatggttgatactggctttggtgctatggactttactacattacaggctaacaaaagtgaagttccactggatatttgtacatctatttgcaaatatccagattatattaaaatggtgtcagaaccatatggcgacagcttatttttttatttacgaagggaacaaatgtttgttagacatttatttaatagggctggtactgttggtgaaaatgtaccagacgatttatacattaaaggctctgggtctactgcaaatttagccagttcaaattattttcctacacctagtggttctatggttacctctgatgcccaaatattcaataaaccttattggttacaacgagcacagggccacaataatggcatttgttggggtaaccaactatttgttactgttgttgatactacacgcagtacaaatatgtcattatgtgctgccatatctacttcagaaactacatataaaaatactaactttaaggagtacctacgacatggggaggaatatgatttacagtttatttttcaactgtgcaaaataaccttaactgcagacgttatgacatacatacattctatgaattccactattttggaggactggaattttggtctacaacctcccccaggaggcacactagaagatacttataggtttgtaacatcccaggcaattgcttgtcaaaaacatacacctccagcacctaaagaagatccccttaaaaaatacactttttgggaagtaaatttaaaggaaaagttttctgcagacctagatcagtttcctttaggacgcaaatttttactacaagcaggattgaaggccaaaccaaaatttacattaggaaaacgaaaagctacacccaccacctcatctacctctacaactgctaaacgcaaaaaacgtaagctgtaagtattgtatgtatgttgcattagtgttgtttgttgtttatatgtttgtatgtgcttgtatgtgcttgtaaatattaagttgtatgtgtgtttgtatgtatggtataataaacacgtgtgtatgtgtttttaaatgcttgtgtaactattgtgtgatgcaacataaataaacttattgtttcaacacctactaattgtgttgtggttattcattgtatataaactatatttgctacatcctgtttttgttttatatatactatattttgtagcgccagcggccattttgtagcttcaaccgaattcggttgcatgctttttggcacaaaatgtgtttttttaaatagttctatgtcagcaactatagtttaaacttgtacgtttcctgcttgccatgcgtgccaaatccctgttttcctgacctgcactgcttgccaaccattccattgttttttacactgcactatgtgcaactactgaatcactatgtacattgtgtcatataaaataaatcactatgcgccaacgccttacataccgctgttaggcacatatttttggcttgttttaactaacctaattgcatatttggcataaggtttaaacttctaaggccaactaaatgtcaccctagttcatacatgaactgtgtaaaggttagtcatacattgttcatttgtaaaactgcacatgggtgtgtgcaaaccgttttgggttacacatttacaagcaacttatataataatactaaactacaataatccatgtataaaactaagggcgtaaccgaaatcggttgaaccgaaaccggttagtataaaagcagacattttatgcaccaaaagagaactgcaatgtttcaggacccacaggagcgacccggaaagttaccacagttatgcacagagctgcaaacaactatacatgatataatattagaatgtgtgtactgcaagcaacagttactgcgacgtgaggtatatgactttgcttttcgggatttatgcatagtatatagagatgggaatccatatgctgtatgtgataaatgtttaaagttttattctaaaattagtgagtatagacattattgttatagtttgtatggaacaacattagaacagcaatacaacaaaccgttgtgtgatttgttaattaggtgtattaactgtcaaaagccactgtgtcctgaagaaaagcaaagacatctggacaaaaagcaaagattccataatataaggggtcggtggaccggtcgatgtatgtcttgttgcacatcatcaagaacacgtagagaaacccagctgtaatcatgcatggagatacacctacattgcatgaatatatgttagatttgcaaccagagacaactgatctctactgttatgagcaattaaatgacagctcagaggaggaggatgaaatagatggtccagctggacaagcagaaccggacagagccaattacaatattgtaaccttttgttgcaagtgtgactctacgcttcggttgtgcgtacaaagcacacacgtagacattcgtactttggaagacctgttaatgggcacactaggaattgtgtgccccatctgttctcagaaaccataatctacc

SEQ ID NO: 55 - DNA, 7906 bp, Homo sapiens
  source 1..7906: mol_type = genomic DNA; note = UNCseq2105
atggctgatcctgcaggtaccaatggggaagagggtacgggatgtaatggatggttttatgtagaggctgtagtggaaaaaaaaacaggggatgctatatcagatgacgagaacgaaaatgacagtgatacaggtgaagatttggtagattttatagtaaatgataatgattatttaacacaggcagaaacagagacagcacatgggttgtttactgcacaggaagcaaaacaacatagagatgcagtacaggttctaaaacgaaagtatttgggtagtccacttagtgatattagtggatgtgtagacaataatattagtcctagattaaaagctatatgtatagaaaaacaaagtagagctgcaaaaaggagattatttgaaagcgaagacagcgggtatggcaatactgaagtggaaactcagcagatgttacaggtagaagggcgccatgagactgaaacaccatgtagtcagtatagtggtggaagtgggggtggttgcagtcagtacagtagtggaagtgggggagagggtgttagtgaaagacacactatatgccaaacaccacttacaaatattttaaatgtactaaaaactagtaatgcaaaggcagcaatgttagcaaaatttaaagagttatacggggtgagttttacagaattagtaagaccatttaaaagtaataaatcaacgtgttgcgattggtgtattgctgcatttggacttacacccagtatagctgacagtataaaaacactattacaacaatattgtttatatttacacattcaaagtttagcatgttcatggggaatggttgtgttactattagtaagatataaatgtggaaaaaatagagaaacaattgaaaaattgctgtctaaactattatgtgtgtctccaatgtgtatgatgatagagcctccaaaattgcgtagtacagcagcagcattatattggtataaaacaggtatatcaaatattagtgaagtgtatggagacacgccagaatggatacaaagacaaacagtattacaacatagttttaatgattgtacatttgaattatcacagatggtacaatgggcctacgataatgacatagtagacgatagtgaaattgcatataaatatgcacaattggcagacactaatagtaatgcaagtgcctttctaaaaagtaattcacaggcaaaaattgtaaaggattgtgcaacaatgtgtagacattataaacgagcagaaaaaaaacaaatgagtatgagtcaatggataaaatatagatgtgatagggtagatgatggaggtgattggaagcaaattgttatgtttttaaggtatcaaggtgtagagtttatgtcatttttaactgcattaaaaagatttttgcaaggcatacctaaaaaaaattgcatattactatatggtgcagctaacacaggtaaatcattatttggtatgagtttaatgaaatttctgcaagggtctgtaatatgttttgtaaattctaaaagccatttttggttacaaccattagcagatgccaaaataggtatgttagatgatgctacagtgccctgttggaactatatagatgacaatttaagaaatgcattggatggaaatttagtttctatggatgtaaagcatagaccattggtacaactaaaatgccctccattattaattacatctaacattaatgctggtacagattctaggtggccttatttacataatagattggtggtgtttacatttcctaatgagtttccatttgacgaaaacggaaatccagtgtatgagcttaatgataagaactggaaatcctttttctcaaggacgtggtccagattaagtttgcacgaggacgaggacaaggaaaacgatggagactctttgccaacgtttaaatgtgtgtcaggacaaaatactaacacattatgaaaatgatagtacagacctacgtgaccatatagactattggaaatacatgcgcctagaatgtgctatttattacaaggccagagaaatgggatttaaacatattaaccaccaggtggtgccaacgctggctgtatcaaagaataaagcattacaagcaattgaactgcaactaacgttagaaacaatatataactcacaatatagtaatgaaaagtggacattacaagacgttagccttgaagtgtatttaactgcaccaacaggatgtataaaaaaacatggatatacagtggaagtgcagtttgatggagacatatgcaatacaatgcattatacaaactggacacatatatatatttgtgaagaagcatcagtaactgtggtagagggtcaagttgactattatggtttatattatgttcatgaaggaatacgaacatattttgtgcagtttaaagatgatgcagaaaaatatagtaaaaataaagtatgggaagttcatgcgggtggtcaggtaatattatgtcctacatctgtgtttagcagcaacgaagtatcctctcctgaaactattaggcagcacttggccaaccactccgccgcgacccataccaaagccgtcgccttgggcaccgaagaaacacagacgactatccagcgaccaagatcagagccagacaccggaaacccctgccacaccactaagttgttgcacagagactcagtggacagtgctccaatcctcactgcatttaacagctcacacaaaggacggattaactgtaatagtaacactacacccatagtacatttaaaaggtgatgctaatactttaaaatgtttaagatatagatttaaaaagcattgtaaattgtatactgcagtgtcgtctacatggcattggacaggacataatgtaaaacataaaagtgcaattgttacacttacatatgatagtgaatggcaacgtgaccaatttttgtctcaagttaaaataccaaaaactattacagtgtctactggatttatgtctatatgacaaatcttgatactgcatccacaacattactggcgtgctttttgctttgcttttgtgtgcttttgtgtgtctgcctattaatacgtccgctgcttttgtctgtgtctacatacacatcattaatactattggtattactattgtggataacagcagcctctgcgtttaggtgttttattgtatatattgtatttgtttatataccattatttttaatacatacacatgcacgctttttaattacataatgtatatgtacataatgtaattgttacatataattgttgtataccataacttactattttttcttttttatttttatatataatttttttttttgtttgtttgtttgttttttaataaactgttattacttaacaatgcgacacaaacgttctgcaaaacgcacaaaacgtgcatcggctacccaactttataaaacatgcaaacaggcaggtacatgtccacctgacattatacctaaggttgaaggcaaaactattgctgatcaaatattacaatatggaagtatgggtgtattttttggtgggttaggaattggaacagggtcgggtacaggcggacgcactgggtatattccattgggaacaaggcctcccacagctacagatacacttgctcctgtaagaccccctttaacagtagatcctgtgggcccttctgatccttctatagtttctttagtggaagaaactagttttattgatgctggtgcaccaacatctgtaccttccattcccccagatgtatcaggatttagtattactacttcaactgataccacacctgctatattagatattaataatactgttactactgttactacacataataatcccactttcactgacccatctgtattgcagcctccaacacctgcagaaactggagggcattttacactttcatcatccactattagtacacataattatgaagaaattcctatggatacatttattgttagcacaaaccctaacacagtaactagtagcacacccataccagggtctcgcccagtggcacgcctaggattatatagtcgcacaacacaacaagttaaagttgtagaccctgcttttgtaaccactcccactaaacttattacatatgataatcctgcatatgaaggtatagatgtggataatacattatattttcctagtaatgataatagtattaatatagctccagatcctgactttttggatatagttgctttacataggccagcattaacctctaggcgtactggcattaggtacagtagaattggtaataaacaaacactacgtactcgtagtggaaaatctataggtgctaaggtacattattattatgatttgagtactattgatcctgcagaagaaatagaattacaaactataacaccttctacatatactaccacttcacatgcagcctcagctacttctattaataatggattatatgatatttatgcagatgactttattacagatacttctacaaccccggtaccatctgtaccctctacatctttatcaggttatattcctgcaaatacaacaattccttttggtggtgcatacaatattcctttagtatcaggtcctgatatacccattaatataactgaccaagctccttcattaattcctatagttccagggtctccacaatatacaattattgctgatgcaggtgacttttatttacatcctagttattacatgttacgaaaacgacgtaaacgtttaccatattttttttcagatgtctctttggctgcctagtgaggccactgtctacttgcctcctgtcccagtatctaaggttgtaagcacggatgaatatgttgcacgcacaaacatatattatcatgcaggaacatccagactacttgcagttggacatccctattttcctattaaaaaacctaacaataacaaaatattagttcctaaagtatcaggattacaatacagggtatttagaatacatttacctgaccccaataagtttggttttcctgacacctcattttataatccagatacacagcggctggtttgggcctgtgtaggtgttgaggtaggtcgtggtcagccattaggtgtgggcattagtggccatcctttattaaataaattggatgacacagaaaatgctagtgcttatgcagcaaatgcaggtgtggataatagagaatgtatatctatggattacaaacaaacacaattgtgtttaattggttgcaaaccacctataggggaacactggggcaaaggatccccatgtaccaatgttgcagtaaatccaggtgattgtccaccattggagttaataaacacagttattcaggatggtgatatggttgatactggctttggtgctatggactttactacattacaggctaacaaaagtgaagttccactggatatttgtacatctatttgcaaatatccagattatattaaaatggtgtcagaaccatatggcgacagcttatttttttatttacgaagggaacaaatgtttgttagacatttatttaatagggctggtgctgttggtgaaaatgtaccagacgatttatacattaaaggctctgggtctactgcaaatttagccagttcaaattattttcctacacctagtggttctatggttacctctgatgcccaaatattcaataaaccttattggttacaacgagcacagggccacaataatggcatttgttggggtaaccaactatttgttactgttgttgatactacacgcagtacaaatatgtcattatgtgctgccatatctacttcagaaactacatataaaaatactaactttaaggagtacctacgacatggggaggaatatgatttacagtttatttttcaactgtgcaaaataaccttaactgcagacgttatgacatacatacattctatgaattccactattttggaggactggaattttggtctacaacctcccccaggaggcacactagaagatacttataggtttgtaacatcccaggcaattgcttgtcaaaaacatacacctccagcacctaaagaagatccccttaaaaaatacactttttgggaagtaaatttaaaggaaaagttttctgcagacctagatcagtttcctttaggacgcaaatttttactacaagcaggattgaaggccaaaccaaaatttacattaggaaaacgaaaagctacacccaccacctcatctacctctacaactgctaaacgcaaaaaacgtaagctgtaagtattgtatgtatgttgaattagtgttgtttgttgtttatatgtttgtatgtgcttgtatgtgcttgtaaatattaagttgtatgtgtgtttgtatgtatggtataataaacacgtgtgtatgtgtttttaaatgcttgtgtaactattgtgtcatgcaacataaataaacttattgtttcaacacctactaattgtgttgtggttattcattgtatataaactatatttgctacatcctgtttttgttttatatatactatattttgtagcgccagcggccattttgtagcttcaaccgaattcggttgcatgctttttggcacaaaatgtgtttttttaaatagttctatgtcagcaactatagtttaaacttgtacgtttcctgcttgccatgcgtgccaaatccctgttttcctgacctgcactgcttgccaaccattccattgttttttacactgcactatgtgcaactactgaatcactatgtacattgtgtcatataaaataaatcactatgcgccaacgccttacataccgctgttaggcacatatttttggcttgttttaactaacctaattgcatatttggcataaggtttaaacttctaaggccaactaaatgtcaccctagttcatacatgaactgtgtaaaggttagtcatacattgttcatttgtaaaactgcacatgggtgtgtgcaaaccgttttgggttacacatttacaagcaacttatataataatactaaactacaataattcatgtataaaactaagggcgtaaccgaaatcggttgaaccgaaaccggttagtataaaagcagacattttatgcaccaaaagagaactgcaatgtttcaggacccacaggagcgacccagaaagttaccacagttatgcacagagctgcaaacaactatacatgatataatattagaatgtgtgtactgcaagcaacagttactgcgacgtgaggtatatgactttgcttttcgggatttatgcatagtatatagagatgggaatccatatgctgtatgtgataaatgtttaaagttttattctaaaattagtgagtatagacattattgttatagtttgtatggaacaacattagaacagcaatacaacaaaccgttgtgtgatttgttaattaggtgtattaactgtcaaaagccactgtgtcctgaagaaaagcaaagacatctggacaaaaagcaaagattccataatataaggggtcggtggaccggtcgatgtatgtcttgttgcagatcatcaagaacacgtagagaaacccagctgtaatcatgcatggagatacacctacattgcatgaatatatgttagatttgcaaccagagacaactgatctctactgttatgagcaattaaatgacagctcagaggaggaggatgaaatagatggtccagctggacaagcagaaccggacagagcccattacaatattgtaaccttttgttgcaagtgtgactctacgcttcggttgtgcgtacaaagcacacacgtagacattcgtactttggaagacctgttaatgggcacactaggaattgtgtgccccatctgttctcagaaaccataatctacc

SEQ ID NO: 56 - DNA, 7906 bp, Homo sapiens
  source 1..7906: mol_type = genomic DNA; note = UNCseq2106
atggctgatcctgcaggtaccaatggggaagagggtacgggatgtaatggatggttttatgtagaggctgtagtggaaaaaaaaacaggggatgctatatcagatgacgagaacgaaaatgacagtgatacaggtgaagatttggtagattttatagtaaatgataatgattatttaacacaggcagaaacagagacagcacatgggttgtttactgcacaggaagcaaaacaacatagagatgcagtacaggttctaaaacgaaagtatttgggtagtccacttagtgatattagtggatgtgtagacaataatattagtcctagattaaaagctatatgtatagaaaaacaaagtagagctgcaaaaaggagattatttgaaagcgaagacagcgggtatggcaatactgaagtggaaactcagcagatgttacaggtagaagggcgccatgagactgaaacaccatgtagtcagtatagtggtggaagtgggggtggttgcagtcagtacagtagtggaagtgggggagagggtgttagtgaaagacacactatatgccaaacaccacttacaaatattttaaatgtactaaaaactagtaatgcaaaggcagcaatgttagcaaaatttaaagagttatacggggtgagttttacagaattagtaagaccatttaaaagtaataaatcaacgtgttgcgattggtgtattgctgcatttggacttacacccagtatagctgacagtataaaaacactattacaacaatattgtttatatttacacattcaaagtttagcatgttcatggggaatggttgtgttactattagtaagatataaatgtggaaaaaatagagaaacaattgaaaaattgctgtctaaactattatgtgtgtctccaatgtgtatgatgatagagcctccaaaattgcgtagtacagcagcagcattatattggtataaaacaggtatatcaaatattagtgaagtgtatggagacacgccagaatggatacaaagacaaacagtattacaacatagttttaatgattgtacatttgaattatcacagatggtacaatgggcctacgataatgacatagtagacgatagtgaaattgcatataaatatgcacaattggcagacactaatagtaatgcaagtgcctttctaaaaagtaattcacaggcaaaaattgtaaaggattgtgcaacaatgtgtagacattataaacgagcagaaaaaaaacaaatgagtatgagtcaatggataaaatatagatgtgatagggtagatgatggaggtgattggaagcaaattgttatgtttttaaggtatcaaggtgtagagtttatgtcatttttaactgcattaaaaagatttttgcaaggcatacctaaaaaaaattgcatattactatatggtgcagctaacacaggtaaatcattatttggtatgagtttaatgaaatttctgcaagggtctgtaatatgttttgtaaattctaaaagccatttttggttacaaccattagcagatgccaaaataggtatgttagatgatgctacagtgccctgttggaactacatagatgacaatttaagaaatgcattggatggaaatttagtttctatggatgtaaagcatagaccattggtacaactaaaatgccctccattattaattacatctaacattaatgctggtacagattctaggtggccttatttacataatagattggtggtgtttacatttcctaatgagtttccatttgacgaaaacggaaatccagtgtatgagcttaatgataagaactggaaatcctttttctcaaggacgtggtccagattaagtttgcacgaggacgaggacaaggaaaacgatggagactctttgccaacgtttaaatgtgtgtcaggacaaaatactaacacattatgaaaatgatagtacagacctacgtgaccatatagactattggaaacacatgcgcctagaatgtgctatttattacaaggccagagaaatgggatttaaacatattaaccaccaggtggtgccaacgctggctgtatcaaagaataaagcattacaagcaattgaactgcaactaacgttagaaacaatatataactcacaatatagtaatgaaaagtggacattacaagacgttagccttgaagtgtatttaactgcaccaacaggatgtataaaaaaacatggatatacagtggaagtgcagtttgatggagacatatgcaatacaatgcattatacaaactggacacatatatatatttgtgaagaagcatcagtaactgtggtagagggtcaagttgactattatggtttatattatgttcatgaaggaatacgaacatattttgtgcagtttaaagatgatgcagaaaaatatagtaaaaataaagtatgggaagttcatgcgggtggtcaggtaatattatgtcctacatctgtgtttagcagcaacgaagtatcctctcctgaaactattaggcagcacttggccaaccaccccgccgcgacccataccaaagccgtcgccttgggcaccgaagaaacacagacgactatccagcgaccaagatcagagccagacaccggaaacccctgccacaccactaagttgttgcacagagactcagtggacagtgctccaatcctcactgcatttaacagctcacacaaaggacggattaactgtaatagtaacactacacccatagtacatttaaaaggtgatgctaatactttaaaatgtttaagatatagatttaaaaagcattgtacattgtatactgcagtgtcgtctacatggcattggacaggacataatgtaaaacataaaagtgcaattgttacacttacatatgatagtgaatggcaacgtgaccaatttttgtctcaagttaaaataccaaaaactattacagtgtctactggatttatgtctatatgacaaatcttgatactgcatccacaacattactggcgtgctttttgctttgcttttgtgtgcttttgtgtgtctgcctattaatacgtccgctgcttttgtctgtgtctacatacacatcattaatactattggtattactattgtggataacagcagcctctgcgtttaggtgttttattgtatatattgtatttgtttatataccattatttttaatacatacacatgcacgctttttaattacataatgtatatgtacataatgtaattgttacatataattgttgtataccataacttactattttttcttttttatttttatatataatttttttttttgtttgtttgtttgttttttaataaactgttatcacttaacaatgcgacacaaacgttctgcaaaacgcacaaaacgtgcatcggctacccaactttataaaacatgcaaacaggcaggtacatgtccacctgacattatacctaaggttgaaggcaaaactattgctgatcaaatattacaatatggaagtatgggtgtattttttggtgggttaggaattggaacagggtcgggtacaggcggacgcactgggtatattccattgggaacaaggcctcccacagctacagatacacttgctcctgtaagaccccctttaacagtagatcctgtgggcccttctgatccttctatagtttctttagtggaagaaactagttttattgatgctggtgcaccaacatctgtaccttccattcccccagatgtatcaggatttagtattactacttcaactgataccacacctgctatattagatattaataatactgttactactgttactacacataataatcccactttcactgacccatctgtattgcagcctccaacacctgcagaaactggagggcattttacactttcatcatccactattagtacacataattatgaagaaattcctatggatacatttattgttagcacaaaccctaacacagtaactagtagcacacccataccagggtctcgcccagtggcacgcctaggattatatagtcgcacaacacaacaagttaaagttgtagaccctgcttttgtaaccactcccactaaacttattacatatgataatcctgcatatgaaggtatagatgtggataatacattatattttcctagtaatgataatagtattaatatagctccagatcctgactttttggatatagttgctttacataggccagcattaacctctaggcgtactggcattaggtacagtagaattggtaataaacaaacactacgtactcgtagtggaaaatctataggtgctaaggtacattattattatgatttaagtactattgatcctgcagaagaaatagaattacaaactataacaccttctacatatactaccacttcacatgcagcctcacctacttctattaataatggattatatgatatttatgcagatgactttattacagatacttctacaaccccggtaccatctgtaccctctacatctttatcaggttatattcctgcaaatacaacaattccttttggtggtgcatacaatattcctttagtatcaggtcctgatatacccattaatataactgaccaagctccttcattaattcctatagttccagggtctccacaatatacaattattgctgatgcaggtgacttttatttacatcctagttattacatgttacgaaaacgacgtaaacgtttaccatattttttttcagatgtctctttggctgcctagtgaggccactgtctacttgcctcctgtcccagtatctaaggttgtaagcacggatgaatatgttgcacgcacaaacatatattatcatgcaggaacatccagactacttgcagttggacatccctattttcctattaaaaaacctaacaataacaaaatattagttcctaaagtatcaggattacaatacagggtatttagaatacatttacctgaccccaataagtttggttttcctgacacctcattttataatccagatacacagcggctggtttgggcctgtgtaggtgttgaggtaggtcgtggtcagccattaggtgtgggcattagtggccatcctttattaaataaattggatgacacagaaaatgctagtgcttatgcagcaaatgcaggtgtggataatagagaatgtatatctatggattacaaacaaacacaattgtgtttaattggttgcaaaccacctataggggaacactggggcaaaggatccccatgtaccaatgttgcagtaaatccaggtgattgtccaccattggagttaataaacacagttattcaggatggtgatatggttgatactggctttggtgctatggactttactacattacaggctaacaaaagtgaagttccactggatatttgtacatctatttgcaaatatccagattatattaaaatggtgtcagaaccatatggcgacagcttatttttttatttacgaagggaacaaatgtttgttagacatttatttaatagggctggtgctgttggtgaaaatgtaccagacgatttatacattaaaggctctgggtctactgcaaatttagccagttcaaattattttcctacacctagtggttctatggttacctctgatgcccaaatattcaataaaccttattggttacaacgagcacagggccacaataatggcatttgttggggtaaccaactatttgttactgttgttgatactacacgcagtacaaatatgtcattatgtgctgccatatctacttcagaaactacatataaaaatactaactttaaggagtacctacgacatggggaggaatatgatttacagtttatttttcaactgtgcaaaataaccttaactgcagacgttatgacatacatacattctatgaattccactattttggaggactggaattttggtctacaacctcccccaggaggcacactagaagatacttataggtttgtaacatcccaggcaattgcttgtcaaaaacatacacctccagcacctaaagaagatccccttaaaaaatacactttttgggaagtaaatttaaaggaaaagttttctgcagacctagatcagtttcctttaggacgcaaatttttactacaagcaggattgaaggccaaaccaaaatttacattaggaaaacgaaaagctacacccaccacctcatctacctctacaactgctaaacgcaaaaaacgtaagctgtaagtattgtatgtatgttgaattagtgttgtttgttgtttatatgtttgtatgtgcttgtatgtgcttgtaaatattaagttgtatgtgtgtttgtatgtatggtataataaacacgtgtgtatgtgtttttaaatgcttgtgtaactattgtgtcatgcaacataaataaacttattgtttcaacacctactaattgtgttgtggttattcattgtatataaactatatttgctacatcctgtttttgttttatatatactatattttgtagcgccagcggccattttgtagcttcaaccgaattcggttgcatgctttttggcacaaaatgtgtttttttaaatagttctatgtcagcaactatggtttaaacttgtacgtttcctgcttgccatgcgtgccaaatccctgttttcctgacctgcactgcttgccaaccattccattgttttttacactgcactatgtgcaactactgaatcactatgtacattgtgtcatataaaataaatcactatgcgccaacgccttacataccgctgttaggcacatatttttggcttgttttaactaacctaattgcatatttggcataaggtttaaacttctaaggccaactaaatgtcaccctagttcatacatgaactgtgtaaaggttagtcatacattgttcatttgtaaaactgcacatgggtgtgtgcaaaccgttttgggttacacatttacaagcaacttatataataatactaaactacaataattcatgtataaaactaagggcgtaaccgaaatcggttgaaccgaaaccggttagtataaaagcagacattttatgcaccaaaagagaactgcaatgtttcaggacccacaggagcgacccagaaagttaccacagttatgcacagagctgcaaacaactatacatgatataatattagaatgtgtgtactgcaagcaacagttactgcgacgtgaggtatatgactttgcttttcgggatttatgcatagtatatagagatgggaatccatatgctgtatgtgataaatgtttaaagttttattctaaaattagtgagtatagacattattgttatagtttgtatggaacaacattagaacagcaatacaacaaaccgttgtgtgatttgttaattaggtgtattaactgtcaaaagccactgtgtcctgaagaaaagcaaagacatctggacaaaaagcaaagattccataatataaggggtcggtggaccggtcgatgtatgtcttgttgcagatcatcaagaacacgtagagaaacccagctgtaatcatgcatggagatacacctacattgcatgaatatatgttagatttgcaaccagagacaactgatctctactgttatgagcaattaaatgacagctcagaggaggaggatgaaatagatggtccagctggacaagcagaaccggacagagcccattacaatattgtaaccttttgttgcaagtgtgactctacgcttcggttgtgcgtacaaagcacacacgtagacattcgtactttggaagacctgttaatgggcacactaggaattgtgtgccccatctgttctcagaaaccataatctacc

SEQ ID NO: 57 - DNA, 7906 bp, Homo sapiens
  source 1..7906: mol_type = genomic DNA; note = UNCseq2116
atggctgatcctgcaggtaccaatggggaagagggtacgggatgtaatggatggttttatgtagaggctgtagtggaaaaaaaaacaggggatgctatatcagatgacgagaacgaaaatgacagtgatacaggtgaagatttggtagattttatagtaaatgataatgattatttaacacaggcagacacagagacagcacatgcgttgtttactgcacaggaagcaaaacaacatagagatgcagtacaggttctaaaacgaaagtatttgggtagtccacttagtgatattagtggatgtgtagacaataatattagtcctagattaaaagctatatgtatagaaaaacaaagtagagctgcaaaaaggagattatttgaaagcgaagacagcgggtatggcaatactgaagtggaaactcagcagatgttacaggtagaagggcgccatgagactgaaacaccatgtagtcagtatagtggtggaagtgggggtggttgcagtcagtacagtagtggaagtgggggagagggtgttagtgaaagacacactatatgccaaacaccacttacaaatattttaaatgtactaaaaactagtaatgcaaaggcagcaatgttagcaaaatttaaagagttatacggggtgagtttttcagaattagtaagaccatttaaaagtaataaatcaacgtgttgcgattggtgtattgctgcatttggacttacacccagtatagctgacagtataaaaacactattacaacaatattgtttatatttacacattcaaagtttagcatgttcatggggaatggttgtgttactattagtaagatataaatgtggaaaaaatagagaaacaattgaaaaattgctgtctaaactattatgtgtgtctccaatgtgtatgatgatagagcctccaaaattgcgtagtacagcagcagcattatattggtataaaacaggtatatcaaatattagtgaagtgtatggagacacgccagaatggatacaaagacaaacagtattacaacatagttttaatgattgtacatttgaattatcacagatggtacaatgggcctacgataatgacatagtagacgatagtgaaattgcatataaatatgcacaattggcagacactaatagtaatgcaagtgcctttctaaaaagtaattcacaggcaaaaattgtaaaggattgtgcaacaatgtgtagacattataaacgagcagaaaaaaaacaaatgagtatgagtcaatggataaaatatagatgtgatagggtagatgatggaggtgattggaagcaaattgttatgtttttaaggtatcaaggtgtagagtttatgtcatttttaactgcattaaaaagatttttgcaaggcatacctaaaaaaaattgcatattactatatggtgcagctaacacaggtaaatcattatttggtatgagtttaatgaaatttctgcaagggtctgtaatatgttttgtaaattctaaaagccatttttggttacaaccattagcagatgccaaaataggtatgttagatgatgctacagtgccctgttggaactacatagatgacaatttaagaaatgcattggatggaaatttagtttctatggatgtaaagcatagaccattggtacaactaaaatgccctccattattaattacatctaacattaatgctggtacagattctaggtggccttatttacataatagattggtggtgtttacatttcctaatgagtttccatttgacgaaaacggaaatccagtgtatgagcttaatgataagaactggaaatcctttttctcaaggacgtggtccagattaagtttgcacgaggacgaggacaaggaaaacgatggagactctttgccaacgtttaaatgtgtgtcaggacaaaatactaacacattatgaaaatgatagtacagacctacgtgaccatatagactattggaaacacatgcgcctagaatgtgctatttattacaaggccagagaaatgggatttaaacatattaaccaccaggtggtgccaacactggctgtatcaaagaataaagcattacaagcaattgaactgcaactaacgttagaaacaatatataactcacaatatagtaatgaaaagtggacattacaagacgttagccttgaagtgtatttaactgcaccaacaggatgtataaaaaaacatggatatacagtggaagtgcagtttgatggagacatatgcaatacaatgcattatacaaactggacacatatatatatttgtgaagaagcatcagtaactgtggtagagggtcaagttgactattatggtttatattatgttcatgaaggaatacgaacatattttgtgcagtttaaagatgatgcagaaaaatatagtaaaaataaagtatgggaagttcatgcgggtggtcaggtaatattatgtcctacatctgtgtttagcagcaacgaagtatcctctcctgaaattattaggcagcacttggccaaccaccccgccgcgacccataccaaagccgtcgccttgggcaccgaagaaacacagacgactatccagcgaccaagatcagagccagacaccggaaacccctgccacaccactaagttgttgcacagagactcagtggacagtgctccaatcctcactgcatttaacagctcacacaaaggacggattaactgtaatagtaacactacacccatagtacatttaaaaggtgatgctaatactttaaaatgtttaagatatagatttaaaaagcattgtacattgtatactgcagtgtcgtctacatggcattggacaggacataatgtaaaacataaaagtgcaattgttacacttacatatgatagtgaatggcaacgtgaccaatttttgtctcaagttaaaataccaaaaactattacagtgtctactggatttatgtctatatgacaaatcttgatactgcatccacaacattactggcgtgctttttgctttgcttttgtgtgcttttgtgtgtctgcctattaatacgtccgctgcttttgtctgtgtctacatacacatcattaatactattggtattactattgtggataacagcagcctctgcgtttaggtgttttattgtatatattgtatttgtttatataccattatttttaatacatacacatgcacgctttttaattacataatgtatatgtacataatgtaattgttacatataattgttgtataccataacttactattttttcttttttattttcatatataatttttttttttgtttgtttgtttgttttttaataaactgttatcacttaacaatgcgacacaaacgttctgcaaaacgcacaaaacgtgcatcggctacccaactttataaaacatgcaaacaggcaggtacatgtccacctgacattatacctaaggttgaaggcaaaactattgctgatcaaatattacaatatggaagtatgggtgtattttttggtgggttaggaattggaacagggtcgggtacaggcggacgcactgggtatattccattgggaacaaggcctcccacagctacagatacacttgctcctgtaagaccccctttaacagtagatcctgtgggcccttctgatccttctatagtttctttagtggaagaaactagttttattgatgctggtgcaccaacatctgtaccttccattcccccagatgtatcaggatttagtattactacttcaactgataccacacctgctatattagatattaataatactgttactactgttactacacataataatcccactttcactgacccatctgtattgcagcctccaacacctgcagaaactggagggcattttacactttcatcatccactattagtacacataattatgaagaaattcctatggatacatttattgttagcacaaaccctaacacagtaactagtagcacacccataccagggtctcgcccagtggcacgcctaggattatatagtcgcacaacacaacaagttaaagttgtagaccctgcttttgtaaccactcccactaaacttattacatatgataatcctgcatatgaaggtatagatgtggataatacattatatttttctagtaatgataatagtattaatatagctccagatcctgactttttggatatagttgctttacataggccagcattaacctctaggcgtactggcattaggtacagtagaattggtaataaacaaacactacgtactcgtagtggaaaatctataggtgctaaggtacattattattatgattttagtactattgatcctgcagaagaaatagaattacaaactataacaccttctacatatactaccacttcacatgcagcctcacctacttctattaataatggattatatgatatttatgcagatgactttattacagatacttctacaaccccggtaccatctgtaccctctacatctttatcaggttatattcctgcaaatacaacaattccttttggtggtgcatacaatattcctttagtatcaggtcctgatatacccattaatataactgaccaagctccttcattaattcctatagttccagggtctccacaatatacaattattgctgatgcaggtgacttttatttacatcctagttattacatgttacgaaaacgacgtaaacgtttaccatattttttttcagatgtctctttggctgcctagtgaggccactgtctacttgcctcctgtcccagtatctaaggttgtaagcacggatgaatatgttgcacgcacaaacatatattatcatgcaggaacatccagactacttgcagttggacatccctattttcctattaaaaaacctaacaataacaaaatattagttcctaaagtatcaggattacaatacagggtatttagaatacatttacctgaccccaataagtttggttttcctgacacctcattttataatccagatacacagcggctggtttgggcctgtgtaggtgttgaggtaggtcgtggtcagccattaggtgtgggcattagtggccatcctttattaaataaattggatgacacagaaaatgctagtgcttatgcagcaaatgcaggtgtggataatagagaatgtatatctatggattacaaacaaacacaattgtgtttaattggttgcaaaccacctataggggaacactggggcaaaggatccccatgtaccaatgttgcagtaaatccaggtgattgtccaccattagagttaataaacacagttattcaggatggtgatatggttgatactggctttggtgctatggactttactacattacaggctaacaaaagtgaagttccactggatatttgtacatctatttgcaaatatccagattatattaaaatggtgtcagaaccatatggcgacagcttatttttttatttacgaagggaacaaatgtttgttagacatttatttaatagggctggtactgttggtgaaaatgtaccagacgatttatacattaaaggctctgggtctactgcaaatttagccagttcaaattattttcctacacctagtggttctatggttacctctgatgcccaaatattcaataaaccttattggttacaacgagcacagggccacaataatggcatttgttggggtaaccaactatttgttactgttgttgatactacacgcagtacaaatatgtcattatgtgctgccatatctacttcagaaactacatataaaaatactaactttaaggagtacctacgacatggggaggaatatgatttacagtttatttttcaactgtgcaaaataaccttaactgcagacgttatgacatacatacattctatgaattccactattttggaggactggaattttggtctacaacctcccccaggaggcacactagaagatacttataggtttgtaacatcccaggcaattgcttgtcaaaaacatacacctccagcacctaaagaagatccccttaaaaaatacactttttgggaagtaaatttaaaggaaaagttttctgcagacctagatcagtttcctttaggacgcaaatttttactacaagcaggattgaaggccaaaccaaaatttacattaggaaaacgaaaagctacacccaccacctcatctacctctacaactgctaaacgcaaaaaacgtaagctgtaagtattgtatgtatgttgaattagtgttgtttgttgtgtatatgtttgtatgtgcttgtatgtgcttgtaaatattaagttgtatgtgtgtttgtatgtatggtataataaacacgtgtgtatgtgtttttaaatgcttgtgtaactattgtgtcatgcaacataaataaacttattgtttcaacacctactaattgtgttgtggttattcattgtatataaactatatttgctacatcctgtttttgttttatatatactatattttgtagcgccagcggccattttgtagctccaaccgaattcggttgcatgctttttggcacaaaatgtgtttttttaaatagttctatgtcagcaactatagtttaaacttgtacgtttcctgcttgccatgcgtgccaaatccctgttttcctgacctgcactgcttgccaaccattccattgttttttacactgcactatgtgcaactactgaatcactatgtacattgtgtcatataaaataaatcactatgcgccaacgccttacataccgctgttaggcacatatttttggcttgttttaactaacctaattgcatatttggcataaggtttaaacttctaaggccaactaaatgtcaccctagttcatacatgaactgtgtaaaggttagtcatacattgttcatttgtaaaactgcacatgggtgtgtgcaaaccgttttgggttacacatttacaagcaacttatataataatactaaactacaataattcatgtataaaactaagggcgtaaccgaaatcggttgaaccgaaaccggttagtataaaagcagacattttatgcaccaaaagagaactgcaatgtttcaggacccacaggagcgacccagaaagttaccacagttatgcacagagctgcaaacaactatacatgatataatattagaatgtgtgtactgcaagcaacagttactgcgacgtgaggtatatgactttgcttttcgggatttatgcatagtatatagagatgggaatccatatgctgtatgtgataaatgtttaaagttttattctaaaattagtgagtatagacattattgttatagtgtgtatggaacaacattagaacagcaatacaacaaaccgttgtgtgatttgttaattaggtgtattaactgtcaaaagccactgtgtcctgaagaaaagcaaagacatctggacaaaaagcaaagattccataatataaggggtcggtggaccggtcgatgtatgtcttgttgcagatcatcaagaacacgtagagaaacccagctgtaatcatgcatggagatacacctacattgcatgaatatatgttagatttgcaaccagagacaactgatctctactgttatgagcaattaaatgacagctcagaggaggaggatgaaatagatggtccagctggacaagcagaaccggacagagcccattacaatattgtaaccttttgttgcaagtgtgactctacgcttcggttgtgcgtacaaagcacacacgtagacattcgtactttggaagacctgttaatgggcacactaggaattgtgtgccccatctgttctcagaaaccataatctacc

SEQ ID NO: 58 - DNA, 7906 bp, Homo sapiens
  source 1..7906: mol_type = genomic DNA; note = UNCseq2162
atggctgatcctgcaggtaccaatggggaagagggtacgggatgtaatggatggttttatgtagaggctgtagtggaaaaaaaaacaggggatgctatatcagatgacgagaacgaaaatgacagtgatacaggtgaagatctggtagattttatagtaaatgataatgattatttaacacaggcagaaacagagacagcacatgcgttgtttactgcacaggaagcaaaacaacatagagatgcagtacaggttctaaaacgaaagtatttgggtagtccacttagtaatattagtgaatgtgtagacaataatattagtcctagattaaaagctatatgtatagaaaaacaaagtagagctgcaaaaaggagattatttgaaagcgaagacagcgggtatggcaatactgaagtggaaactcagcagatgttacaggtagaagggcgccatgagactgaaacaccatgtagtcagtatagtggtggaagtgggggtggttgcagtcagtatagtagtggaagtgggggagagggtgttagtgaaagacacactatatgccaaacaccacttacaaatattttaaatgtactaaaaactagtaatgcaaaggcagcaatgttagcaaaatttaaagagttatacggggtgagtttttcagaattagtaagaccatttaaaagtaataaatcaacgtgttgcgattggtgtattgctgcatttggacttacacccagtatagctgacagtataaaaacactattacaacaatattgtttatatttacacattcaaagtttagcatgttcatggggaatggttgtgttactattagtaagatataaatgtggaaaaaatagagaaacaattgaaaaattgctgtctaaactattatgtgtgtctccaatgtgtatgatgatagagcctccaaaattgcgtagtacagcagcagcattatattggtataaaacaggtatatcaaatattagtgaagtgtatggagacacgccagaatggatacaaagacaaacagtattacaacatagttttaatgattgtacatttgaattatcacagatggtacaatgggcctacgataatgacatagtagacgatagtgaaattgcatataaatatgcacaattggcagacactaatagtaatgcaagtgcctttctaaaaagtaattcacaggcaaaaattgtaaaggattgtgcaacaatgtgtagacattataaacgagcagaaaaaaaacaaatgagtatgagtcaatggataaaatatagatgtgatagggtagatgatggaggtgattggaagcaaattgttatgtttttaaggtatcaaggtgtagagtttatgtcatttttaactgcattaaaaagatttctgcaaggcatacctaaaaaaaattgcatattactatatggtgcagctaacacaggtaaatcattatttggtatgagtttaatgaaatttctgcaagggtctgtaatatgttttgtaaattctaaaagccatttttggttacaaccattagcagatgccaaaataggtatgttagatgatgctacagtgccctgttggaactacatagatgacaatttaagaaatgcattggatggaaatttagtttctatggatgtaaagcatagaccattggtacaactaaaatgccctccattattaattacatctaacattaatgctggtacagattccaggtggccttatttacataatcgattggtggtgtttacatttcctaatgagtttccatttgacgaaaacggaaatccagtgtatgagcttaatgataagaactggaaatcctttttctcaaggacgtggtccagattaagtttgcacgaggacgaggacaaggaaaacgatggagactctttgccaacgtttaaatgtgtgtcaggacaaaatactaacacattatgaaaatgatagtacagacctacgtgaccatatagactattggaaacacatgcgcctagaatgtgctatttattacaaggccagagaaatgggatttaaacatattaaccaccaggtggtgccaacactggctgtatcaaagaataaagcattacaagcaattgaactgcaactaacgttagaaacaatatataactcacaatatagtaatgaaaagtggacattacaagacgttagccttgaagtgtatttaactgcaccaacaggatgtataaaaaaacatggatatacagtggaagtgcagtttgatggagacatatgcaatacaatgcattatacaaactggacacatatatatatttgtgaagaaacatcagtaactgtggtagagggtcaagttgactattatggtatatattatgttcatgaaggaatacgaacatattttgtgcagtttaaagatgatgcagaaaaatatagtaaaaataaagtatgggaagttcatgcgggtggtcaggtaatattatgtcctacatctgtgtttagcagcgacgaagtatcctctcctgaaattattaggcagcacttggccaaccaccccgccgcgacccataccaaagccgtcgccttgggcaccgaagaaacacagacgactatccagcgaccaagatcagagccagacaccggaaacccctgccacaccaataagttgttgcacagagactccgtggacagtgctccaatcctcactgcagttaacagctcacacaaaggacggattaactgtaatagtaacactacacccatagtacatttaaaaggtgatgctaatactttaaaatgtttaagatatagatttaaaaagcattgtacattgtatactgcagtgtcgtccacatggcattggacaggacataatgtaaaacataaaagtgcaattgttacacttacatatgatagtgaatggcaacgtgaccaatttttgtctcaagtgaaaataccaaaaactattacagtgtctactggatttatgtctatatgacaaaccttgatactgcatccacaacattactggcgtgctttttgctttgcttttgtgtgcttttgtgtgtctgcctattaatacgtccgctgcttttgtctgtgtctacatacgcatcattaatactattggtattagtattgtggataacagcagcctctgcatttaggtgttttattgtatatattgtatttgtttatataccattatttttaatacatacacatgcacgcttcttaattacataatgtatatgtacataatgtaattgttacatataattgttgtataccataaattactatttttttttttttattttcatatataatttttttttttgtttatttgtgtgttttttaataaactgttattacttaacaatgcgacacaaacgttctgcaaaacgcacaaaacgtgcatcggccacccaactttataaaacatgcaaacaggcaggtacatgtccacctgacattatacctaaggttgaaggcaaaactattgctgatcaaatattacaatatggaagtatgggtgtattttttggtgggttaggaattggaacagggtcgggtacaggcggacgcactgggtatattccattgggaacaaggcctcccacagctacagatacacttgctcctgtaagaccccctttaacagtagatcctgtgggcccttccgatccttctatagtttctttagtggaagaaactagttttattgatgctggtgcaccaacacctgtaccttccattcccccagatgtatcaggatttagtattactacttcaactgataccacacctgctatattagatattaataatactgttactactgttactacacataataatcccactttcactgacccatctgtattgcagcctccaacacctgcagaaactggagggcattttacactttcatcatccactattagtacacataattatgaagaaattcctatggatacatttattgttagcacaaaccctaacacagtaactagtagcacacccataccggggtctcgcccagtggcacgcctaggattatatagtcgcacaacacaacaagttaaggttgtggaccctgcttttgtaaccgctcccactaaacttattacatatgataatcctgcatatgaaggtatagatgtggataatacattttattttcctagtaatgataatagtattaatatagctccagatcctgactttttggatatagttgctttacataggccagcattaacctctaggcgtactggcattaggtacagtagaattggtaataaacaaacactacgtactcgtagtggaaaatctataggtgctaaggtacattattattatgatttaagtactattgatcctgcagaagaaatagaattacaaactataacaccttctacatatactaccacttcacatgcagcctcacccacttctattaataatggattatatgatatttatgcagatgactttattacagatactgttacaaccccggtaccatctataccctctacatccttatcagggtatattcctgcaaatacaacaattccttttggtggtgcatacaatattcctttagtatcaggtcctgatatacccattaatataactgaccaagctccttcattactccctatagttccagggtctccacaatatacaattattgctgatgcaggtgacttttatttacatcctagttattacatgttacgaaaacgacgtaaacgtttaccatattttttttcagatgtctctttggctgcctagtgaggccactgtctacttgcctcctgtcccagtatctaaagttgtaagcacggatgaatatgttgcacgcacaaacatatattatcatgcaggaacatccagactacttgcagttggacatccctattttcctattaaaaaacctaacaataacaaaatattagttcctaaagtatcaggattacaatacagggtatttagaatacatttacctgaccccaataagtttggttttcctgacacctcattttacaatccagatacacagcggctggtttgggcctgtgtaggtgttgaggtaggtcgtggtcagccattaggtgtgggcattagtggccatcctttattaaataaattggatgacaccgaaaatgctagtgcttatgcagcaaatgcaggtgtggataatagagaatgtatatctatggattacaaacaaacacaattgtgtttaattggttgcaaaccacctataggggaacactggggcaaaggatccccatgtaccaatgttgcagtaaatccaggtgattgtccaccattagagttaataaacacagttattcaggatggtgatatggttgatactggctttggtgctatggactttactacattacaggctaacaaaagtgaagttccactggatatttgtacatctatttgcaaatatccagattatattaaaatggtgtcagaaccatatggcgacagcttatttttttatttacgaagggaacaaatgtttgttagacatttatttaatagggctggtactgttggtgaaaatgtaccagacgatttatacattaaaggctctgggtctactgcaaatttagccagttcaaattattttcctacacctagtggttctatggttacctctgatgcccaaatattcaataaaccttattggttacaacgagcacagggccacaataatggcatttgttggggtaaccaactatttgttactgttgttgatactacacgcagtacaaatatgtcattatgtgctgccatatctacttcagaacctacatataaaaatactaactttaaggagtacctacgacatggggaggaatatgatttacagtttatttttcaactgtgcaaaataaccttaactgcagacgttatgacatacatacattctatgaattccactattttggaggactggaattttggtttacaaccccctccaggaggcacactagaagatacttataggtttgtaacatcccaggcaattgcttgtcaaaaacatacacctccagcacctaaagaagatccccttaaaaaatatactttttgggaagtaaatttaaaagaaaagttttctgcagacctagatcagtttcctttaggacgcaaatttttactacaagcaggattgaaggccaaaccaaaatttacattaggaaaacgaaaagctacacccaccacctcatctacctctacaactgctaaacgcaaaaaacgtaagctgtaagtattgtatgtatgttgaattagtgttgtttgttgtgtatatgtttgtatgtgcttgtatgtgcttgtaaatattacgttgtatgtgtgtttgtatgtatggtataataaacacgtgtgtatgtgtttttaaatgcttgtgtaactattgtgtcatgcaacataaataaacttattgtttcatcacctactaattgtgttgtggttattcattgtatataaactatatttgctacattctgtttttgttttatatatactatattttgtagcgccagcggccattttgtagcttcaaccgaattcggttgcatgctttttggcacaaactgtgtttttttaaatagttctatgtcagcaactatggtttaaacttgtacgtttcctgcttgccatgcgtgccaaatccctgttttcctgacctgcactgcttgccaaccattccattgttttttacactgcactatgtgcaactactgaatcactatgtacattgtgtcatataaaataaatcactatgcgccaacgccttacataccgctgttaggcacatatttttggcttgttttaactaacctaattgcatatttggcataaggtttaaacttctaaggccaactaaatgtcaccctagttcatacatgaactgtgtaaaggttagtcatacattgttcatttgtaaaactgcacatgggtgtgtgcaaaccgttttgggttacacatttacaaggaacttatctaataatactaaactacaataattcatgtataaaactaagggcgtaaccgaaatcggttgaaccgaaaccggttagtataaaagcagacattttatgcaccaaaagagaactgcaatgtttcaggacccacaggagcgacccagaaagttaccacagttatgcacagagctgcaaacaactatacatgatataatattagaatgtgtgtactgcaagcaacagttactgcgacgtgaggtatatgactttgcttttcgggatttatgcatagtatatagagatgggaatccatatgctgtatgtgataaatgtttaaagttttattctaaaattagtgagtatagacattattgttatagtttgtatggaacaacattagaacagcaatacaacaaaccgttgtgtgatttgttaattaggtgtattaactgtcaaaagccactgtgtcctgaagaaaagcaaagacatctggacaaaaagcaaagattccataatataaggggtcggtggaccggtcgatgtatgtcttgttgcagatcatcgagaacacgtagagaaacccagctgtaatcatgcatggagatacacctacattgcatgaatatatgttagatttgcaaccagagacaactgatctctactgttatgagcaattaaatgacagctcagaggaggaggatgaaatagatggtccagctggacaagcagaaccggacagagcccattacaatattgtaaccttctgttgcaagtgtgactctacgcttcggttgtgcgtacaaagcacacacgtagacatccgtactttggaagacctgttaatgggcacactaggaattgtgtgccccatctgttctcagaaaccataatctacc

SEQ ID NO: 59 - DNA, 7906 bp, Homo sapiens
  source 1..7906: mol_type = genomic DNA; note = UNCseq2166
atggctgatcctgcaggtaccaatggggaagagggtacgggatgtaatggatggttttatgtagaggctgtagtggaaaaaaaaacaggggatgctatatcagatgacgagaacgaaaatgacagtgatacaggtgaagatttggtagattttatagtaaatgataatgattatttaacacaggcagaaacagagacagcacatgcgttgtttactgcacaggaagcaaaacaacatagagatgcagtacaggttctaaaacgaaagtatttgggtagtccacttagtgatattagtggatgtgtagacaataatattagtcctagattaaaagctatatgtatagaaaaacaaagtagagctgcaaaaaggagattatttgaaagcgaagacagcgggtatggcaatactgaagtggaaactcagcagatgttacaggtagaagggcgccatgagactgaaacaccatgtagtcagtatagtggtggaagtgggggtggttgcagtcagtacagtagtggaagtgggggagagggtgttagtgaaagacacactatatgccaaacaccacttacaaatattttaaatgtactaaaaactagtaatgcaaaggcagcaatgttagcaaaatttaaagagttatacggggtgagtttttcagaattagtaagaccatttaaaagtaataaatcaacgtgttgcgattggtgtattgctgcatttggacttacacccagtatagctgacagtataaaaacactattacaacaatattgtttatatttacacattcaaagtttagcatgttcatggggaatggttgtgttactattagtaagatataaatgtggaaaaaatagagaaacaattgaaaaattgctgtctaaactattatgtgtgtctccaatgtgtatgatgatagagcctccaaaattgcgtagtacagcagcagcattatattggtataaaacaggtatatcaaatattagtgaagtgtatggagacacgccagaatggatacaaagacaaacagtattacaacatagttttaatgattgtacatttgaattatcacagatggtacaatgggcctacgataatgacatagtagacgatagtgaaattgcatataaatatgcacaattggcagacactaatagtaatgcaagtgcctttctaaaaagtaattcacaggcaaaaattgtaaaggattgtgcaacaatgtgtagacattataaacgagcagaaaaaaaacaaatgagtatgagtcaatggataaaatatagatgtgatagggtagatgatggaggtgattggaagcaaattgttatgtttttaaggtatcaaggtgtagagtttatgtcatttttaactgcattaaaaagatttttgcaaggcatacctaaaaaaaattgcatattactatatggtgcagctaacacaggtaaatcattatttggtatgagtttaatgaaatttctgcaagggtctgtaatatgttttgtaaattctaaaagccatttttggttacaaccattagcagatgccaaaataggtatgttagatgatgctacagtgccctgttggaactacatagatgacaatttaagaaatgcattggatggaaatttagtttctatggatgtaaagcatagaccattggtacaactaaaatgccctccattattaattacatctaacattaatgctggtacagattctaggtggccttatttacataatagattggtggtgtttacatttcctaatgagtttccatttgacgaaaacggaaatccagtgtatgagcttaatgataagaactggaaatcctttttctcaaggacgtggtccagattaagtttgcacgaggacgaggacaaggaaaacgatggagactctttgccaacgtttaaatgtgtgtcaggacaaaatactaacacattatgaaaatgatagtacagacctacgtgaccatatagactattggaaacacatgcgcctagaatgtgctatttattacaaggccagagaaatgggatttaaacatattaaccaccaggtggtgccaacactggctgtatcaaagaataaagcattacaagcaattgaactgcaactaacgttagaaacaatatataactcacaatatagtaatgaaaagtggacattacaagacgttagccttgaagtgtatttaactgcaccaacaggatgtataaaaaaacatggatatacagtggaagtgcagtttgatggagacatatgcaatacaatgcattatacaaactggacacatatatatatttgtgaagaagcatcagtaactgtggtagagggtcaagttgactattatggtttatattatgttcatgaaggaatacgaacatattttgtgcagtttaaagatgatgcagaaaaatatagtaaaaataaagtatgggaagttcatgcgggtggtcaggtaatattatgtcctacatctgtgtttagcagcaacgaagtatcctctcctgaaattattaggcagcacttggccaaccaccccgccgcgacccataccaaagccgtcgccttgggcaccgaagaaacacagacgactatccagcgaccaagatcagagccagacaccggaaacccctgccacaccactaagttgttgcacagagactcagtggacagtgctccaatcctcactgcatttaacagctcacacaaaggacggattaactgtaatagtaacactacacccatagtacatttaaaaggtgatgctaataatttaaaatgtttaagatatagatttaaaaagcattgtacattgtatactgcagtgtcgtctacatggcattggacaggacataatgtaaaacataaaagtgcaattgttacacttacatatgatagtgaatggcaacgtgaccaatttttgtctcaagttaaaataccaaaaactattacagtgtctactggatttatgtctatatgacaaatcttgatactgcatccacaacattactggcgtgctttttgctttgcttttgtgtgcttttgtgtgtctgcctattaatacgtccgctgcttttgtctgtgtctacatacacatcattaataatattggtattactattgtggataacagcagcctctgcgtttaggtgttttattgtatatattatatttgtttatataccattatttttaatacatacacatgcacgctttttaattacataatgtatatgtacataatgtaattgttacatataattgttgtataccataacttactattttttcttttttattttcatatataatttttttttttgtttgtttgtttgttttttaataaactgttattacttaacaatgcgacacaaacgttctgcaaaacgcacaaaacgtgcatcggctacccaactttataaaacatgcaaacaggcaggtacatgtccacctgacattatacctaaggttgaaggcaaaactattgctgatcaaatattacaatatggaagtatgggtgtattttttggtgggttaggaattggaacagggtcgggtacaggcggacgcactgggtatattccattgggaacaaggcctcccacagctacagatacacttgctcctgtaagaccccctttaacagtagatcctgtgggcccttctgatccttctatagtttctttagtggaagaaactagttttattgatgctggtgcaccaacatctgtaccttccattcccccagatgtatcaggatttagtattactacttcaactgataccacacctgctatattagatattaataatactgttactactgttactacacataataatcccactttcactgacccatctgtattgcagcctccaacacctgcagaaactggagggcattttacactttcatcatccactattagtacacataattatgaagaaattcctatggatacatttattgttagcacaaaccctaacacagtaactagtagcacacccataccagggtctcgcccagtggcacgcctaggattatatagtcgcacaacacaacaggttaaagttgtagaccctgcttttgtaaccactcccactaaacttattacatatgataatcctgcatatgaaggtatagatgtggataatacattatatttttctagtaatgataatagtattaatatagctccagatcctgactttttggatatagttgctttacataggccagcattaacctctaggcgtactggcattaggtacagtagaattggtaataaacaaacactacgtactcgtagtggaaaatctataggtgctaaggtacattattattatgatttcagtactattgatcctgcagaagaaatagaattacaaactataacaccttctacatatactaccacttcacatgcagcctcacctacttctattaataatggattatatgatatttatgcagatgactttattacagatacttctacaaccccggtaccatctgtaccctctacatctttatcaggttatattcctgcaaatacaacaattccttttggtggtgcatacaatattcctttagtatcaggtcctgatatacccattaatataactgaccaagctccttcattaattcctatagttccagggtctccacaatatacaattattgctgatgcaggtgacttttatttacatcctagttattacatgttacgaaaacgacgtaaacgtttaccatattttttttcagatgtctctttggctgcctagtgaggccactgtctacttgcctcctgtcccagtatctaaggttgtaagcacggatgaatatgttgcacgcacaaacatatattatcatgcaggaacatccagactacttgcagttggacatccctattttcctattaaaaaacctaacaataacaaaatattagttcctaaagtatcaggattacaatacagggtatttagaatacatttacctgaccccaataagtttggttttcctgacacctcattttataatccagatacacagcggctggtttgggcctgtgtaggtgttgaggtaggtcgtggtcagccattaggtgtgggcattagtggccatcctttattaaataaattggatgacacagaaaatgctagtgcttatgcagcaaatgcaggtgtggataatagagaatgtatatctatggattacaaacaaacacaattgtgtttaattggttgcaaaccacctataggggaacactggggcaaaggatccccatgtaccaatgttgcagtaaatccaggtgattgtccaccattagagttaataaacacagttattcaggatggtgatatggttgatactggctttggtgctatggactttactacattacaggctaacaaaagtgaagttccactggatatttgtacatctatttgcaaatatccagattatattaaaatggtgtcagaaccatatggcgacagcttatttttttatttacgaagggaacaaatgtttgttagacatttatttaatagggctggtactgttggtgaaaatgtaccagacgatttatacattaaaggctctgggtctactgcaaatttagccagttcaaattattttcctacacctagtggttctatggttacctctgatgcccaaatattcaataaaccttattggttacaacgagcacagggccacaataatggcatttgttggggtaaccaactatttgttactgttgttgatactacacgcagtacaaatatgtcattatgtgctgccatatctacttcagaaactacatataaaaatactaactttaaggagtacctacgacatggggaggaatatgatttacagtttatttttcaactgtgcaaaataaccttaactgcagacgttatgacatacatacattctatgaattccactattttggaggactggaattttggtctacaacctcccccaggaggcacactagaagatacttataggtttgtaacatcccaggcaattgcttgtcaaaaacatacacctccagcacctaaagaagatccccttaaaaaatacactttttgggaagtaaatttaaaggaaaagttttctgcagacctagatcagtttcctttaggacgcaaatttttactacaagcaggattgaaggccaaaccaaaatttacattaggaaaacgaaaagctacacccaccacctcatctacctctacaactgctaaacgcaaaaaacgtaagctgtaagtattgtatgtatgttgaattagtgttgtttgttgtgtatatgtttgtatgtgcttgtatgtgcttgtaaatattaagttgtatgtgtgtttgtatgtatggtataataaacacgtgtgtatgtgtttttaaatgcttgtgtaactattgtgtcatgcaccataaataaacttattgtttcaacacctactaattgtgttgtggttattcattgtatataaactatatttgctacatcctgtttttgttttatatatactatattttgtagcgccagcggccattttgtagcttcaaccgaattcggttgcatgctttttggcacaaaatgtgtttttttaaatagttctatgtcagcaactatggtttaaacttgtacgtttcctgcttgctatgcgtgccaaatccctgttttcctgacctgcactgcttgccaaccattccattgttttttacactgcactatgtgcaactactgaatcactatgtacattgtgtcatataaaataaatcactatgcgccaacgccttacataccgctgttaggcacatatttttggcttgttttaactaacctaattgcatatttggcataaggtttaaacttctaaggccaactaaatgtcaccctagttcatacatgaactgtgtaaaggttagtcatacattgttcatttgtaaaactgcacatgggtgtgtgcaaaccgttttgggttacacatttacaagcaacttatataataatactaaactacaataattcatgtataaaactaagggcgtaaccgaaatcggttgaaccgaaaccggttagtataaaagcagacattttatgcaccaaaagagaactgcaatgtttcaggacccacaggagcgacccagaaagttaccacagttatgcacagagctgcaaacaactatacatgatataatattagaatgtgtgtactgcaagcaacagttactgcgacgtgaggtatatgactttgcttttcgggatttatgcatagtatatagagatgggaatccatatgctgtatgtgataaatgtttaaagttttattctaaaattagtgagtatagacattattgttatagtttgtatggaacaacattagaacagcaatacaacaaaccgttgtgtgatttgttaattaggtgtattaactgtcaaaagccactgtgtcctgaagaaaagcaaagacatctggacaaaaagcaaagattccataatataaggggtcggtggaccggtcgatgtatgtcttgttgcagatcatcaagaacacgtagagaaacccagctgtaatcatgcatggagatacacctacattgcatgaatatatgttagatttgcaaccagagacaactgatctctactgttatgagcaattaaatgacagctcagaggaggaggatgaaatagatggtccagctggacaagcagaaccggacagagcccattacaatattgtaaccttttgttgcaagtgtgactctacgcttcggttgtgcgtacaaagcacacacgtagacattcgtactttggaagacctgttaatgggcacactaggaattgtgtgccccatctgttctcagaaaccataatctacc

SEQ ID NO: 60 - DNA, 7906 bp, Homo sapiens
  source 1..7906: mol_type = genomic DNA; note = UNCseq2182
atggctgatcctgcaggtaccaatggggaagagggtacgggatgtaatggatggttttatgtagaggctgtagtggaaaaaaaaacaggggatgctatatcagatgacgataacgaaaatgacagtgatacaggtgaagatttggtagattttatagtaaatgataatgattatttaacacaggcagaaacagagacagcacatgcgttgtttactgcacaggaagcaaaacaacatagagatgcagtacaggttctaaaacgaaagtatttgggtagtccacttagtgatattagtggatgtgtagacaataatattagtcctagattaaaagctatatgtatagaaaaacaaagtagagctgcaaaaaggagattatttgaaagcgaagacagcgggtatggcaatactgaagtggaaactcagcagatgttacaggtagaagggcgccatgagactgaaacaccatgtagtcagtatagtggtggaagtgggggtggttgcagtcagtacagtagtggaagtgggggagagggtgttagtgaaagacacactatatgccaaacaccacttacaaatattttaaatgtactaaaaactagtaatgcaaaggcagcaatgttagcaaaatttaaagagttatacggggtgagttttacagaattagtaagaccatttaaaagtaataaatcaacgtgttgcgattggtgtattgctgcatttggacttacacccagtatagctgacagtataaaaacactattacaacaatattgtttatatttacacattcaaagtttagcatgttcatggggaatggttgtgttactattagtaagatataaatgtggaaaaaatagagaaacaattgaaaaattgctgtctaaactattatgtgtgtctccaatgtgtatgatgatagagcctccaaaattgcgtagtacagcagcagcattatattggtataaaacaggtatatcaaatattagtgaagtgtatggagacacgccagaatggatacaaagacaaacagtattacaacatagttttaatgattgtacatttgaattatcacagatggtacaatgggcctacgataatgacatagtagacgatagtgaaattgcatataaatatgcacaattggcagacactaatagtaatgcaagtgcctttctaaaaagtaattcacaggcaaaaattgtaaaggattgtgcaacaatgtgtagacattataaacgagcagaaaaaaaacaaatgagtatgagtcaatggataaaatatagatgtgatagggtagatgatggaggtgattggaagcaaattgttatgtttttaaggtatcaaggtgtagagtttatgtcatttttaactgcattaaaaagatttttgcaaggcatacctaaaaaaaattgcatattactatatggtgcagctaacacaggtaaatcattatttggtatgagtttaatgaaatttctgcaagggtctgtaatatgttttgtaaattctaaaagccatttttggttacaaccattagcagatgccaaaataggtatgttagatgatgctacagtgccctgttggaactacatagatgacaatttaagaaatgcattggatggaaatttagtttctatggatgtaaagcatagaccattggtacaactaaaatgccctccattattaattacatctaacattaatgctggtacagattctaggtggccttatttacataatagattggtggtgtttacatttcctaatgagtttccatttgacgaaaacggaaatccagtgtatgagcttaatgataagaactggaaatcctttttctcaaggacgtggtccagattaagtttgcacgaggacgaggacaaggaaaacgatggagactctttgccaacgtttaaatgtgtgtcaggacaaaatactaacacattatgaaaatgatagtacagacctacgtgaccatatagactattggaaacacatgcgcctagaatgtgctatttattacaaggccagagaaatgggatttaaacatattaaccaccaggtggtgccaacactggctgtatcaaagaataaagcattacaagcaattgaactgcaactaacgttagaaacaatatataactcacaatatagtaatgaaaagtggacattacaagacgttagccttgaagtgtatttaactgcaccaacaggatgtataaaaaaacatggatatacagtggaagtgcagtttgatggagacatatgcaatacaatgcattatacaaactggacacatatatatatttgtgaagaagcatcagtaactgtggtagagggtcaagttgactattatggtttatattatgttcatgaaggaatacgaacatattttgtgcagtttaaagatgatgcagaaaaatatagtaaaaataaagtatgggaagttcatgcgggtggtcaggtaatattatgtcctacatctgtgtttagcagcaacgaagtatcctctcctgaaattattaggcagcacttggccaaccaccccgccgcgacccataccaaagccgtcgccttgggcaccgaagaaacacagacgactatccagcgaccaagatcagagccagacaccggaaacccctgccacaccactaagttgttgcacagagactcagtggacagtgctccaatcctcactgcatttaacagctcacacaaaggacggattaactgtaatagtaacactacacccatagtacatttaaaaggtgatgctaatactttaaaatgtttaagatatagatttaaaaagcattgtacattgtatactgcagtgtcgtctacatggcattggacaggacataatgtaaaacataaaagtgcaattgttacacttacatatgatagtgaatggcaacgtgaccaatttttgtctcaagttaaaataccaaaaactattacagtgtctactggatttatgtctatatgacaaatcttgatactgcatccacaacattactggcgtgctttttgctttgcttttgtgtgcttttgtgtgtctgcctattaatacgtccgctgcttttgtctgtgtctacatacacatcattaatactattggtattactattgtggataacagcagcctctgcgtttaggtgttttattgtatatattgtatttgtttatataccattatttttaatacatacacatgcacgctttttaattacataatgtatatgtacataatgtaattgttacatataattgttgtataccataacttactattttttctttttaattttcatatataatttttttttttgtttgtttgtttgttttttaataaactgttattacttaacaatgcgacacaaacgttctgcaaaacgcacaaaacgtgcatcggctacccaactttataaaacatgcaaacaggcaggtacatgtccacctgacattatacctaaggttgaaggcaaaactattgctgatcaaatattacaatatggaagtatgggtgtattttttggtgggttaggaattggaacagggtcgggtacaggcggacgcactgggtatattccattgggaacaaggcctcccacagctacagatacacttgctcctgtaagaccccctttaacagtagatcctgtgggcccttctgatccttctatagtttctttagtggaagaaactagttttattgatgctggtgcaccaacatctgtaccttccattcccccagatgtatcaggatttagtattactacttcaactgataccacacctgctatattagatattaataatactgttactactgttactacacataataatcccactttcactgacccatctgtattgcagcctccaacacctgcagaaactggagggcattttacactttcatcatccactattagtacacataattatgaagaaattcctatggatacatttattgttagcacaaaccctaacacagtaactagtagcacacccataccagggtctcgcccagtggcacgcctaggattatatagtcgcacaacacaacaagttaaagttgtagaccctgcttttgtaaccactcccactaaacttattacatatgataatcctgcatatgaaggtatagatgtggataatacattatatttttctagtaatgataatagtattaatatagctccagatcctgactttttggatatagttgctttacataggccagcattaacctctaggcgtactggcataaggtacagtagaattggtaataaacaaacactacgtactcgtagtggaaaatctataggtgctaaggtacattattattatgattttagtactattgatcctgcagaagaaatagaattacaaactataacaccttctacatatactaccacttcacatgcagcctcacctacttctattaataatggattatatgatatttatgcagatgactttattacagatacttctacaaccccggtaccatctgtaccctctacatctttatcaggttatattcctgcaaatacaacaattccttttggtggtgcatacaatattcctttagtatcaggtcctgatatacccattaatataactgaccaagctccttcattaattcctatagttccagggtctccacaatatacaattattgctgatgcaggtgacttttatttacatcctagttattacatgttacgaaaacgacgtaaacgtttaccatattttttttcagatgtctctttggctgcctagtgaggccactgtctacttgcctcctgtcccagtatctaaggttgtaagcacggatgaatatgttgcacgcacaaacatatattatcatgcaggaacatccagactacttgcagttggacatccctattttcctattaaaaaacctaacaataacaaaatattagttcctaaagtatcaggattacaatacagggtatttagaatacatttacctgaccccaataagtttggttttcctgacacctcattttataatccagatacacagcggctggtttgggcctgtgtaggtgttgaggtaggtcgtggtcagccattaggtgtgggcattagtggccatcctttattaaataaattggatgacacagaaaatgctagtgcttatgcagcaaatgcaggtgtggataatagagaatgtatatctatggattacaaacaaacacaattgtgtttaattggttgcaaaccacctataggggaacactggggcaaaggatccccatgtaccaatgttgcagtaaatccaggtgattgtccaccattagagttaataaacacagttattcaggatggtgatatggttgatactggctttggtgctatggactttactacattacaggctaacaaaagtgaagttccactggatatttgtacatctatttgcaaatatccagattatattaaaatggtgtcagaaccatatggcgacagcttatttttttatttacgaagggaacaaatgtttgttagacatttatttaatagggctggtactgttggtgaaaatgtaccagacgatttatacattaaaggctctgggtctactgcaaatttagccagttcaaattattttcctacacctagtggttctatggttacctctgatgcccaaatattcaataaaccttattggttacaacgagcacagggccacaataatggcatttgttggggtaaccaactatttgttactgttgttgatactacacgcagtacaaatatgtcattatgtgctgccatatctacttcagaaactacatataaaaatactaactttaaggagtacctacgacatggggaggaatatgatttacagtttatttttcaactgtgcaaaataaccttaactgcagacgttatgacatacatacattctatgaattccactattttggaggactggaattttggtctacaacctcccccaggaggcacactagaagatacttataggtttgtaacatcccaggcaattgcttgtcaaaaacatacacctccagcacctaaagaagatccccttaaaaaatacactttttgggaagtaaatttaaaggaaaagttttctgcagacctagatcagtttcctttaggacgcaaatttttactacaagcaggattgaaggccaaaccaaaatttacattaggaaaacgaaaagctacacccaccacctcatctacctctacaactgctaaacgcaaaaaacgtaagctgtaagtattgtatgtatgttgaattagtgttgtttgttgtgtatatgtttgtatgtgcttgtatgtgcttgtaaatattaagttgtatgtgtgtttgtatgtatggtataataaacacgtgtgtatgtgtttttaaatgcttgtgtaactattgtgtcatgcaacataaataaacttattgtttcaacacctactaattgtgttgtggttattcattgtatataaactatatttgctacatcctgtttttgttttatatatactatattttgtagcgccagcggccattttgtagcttcaaccgaattcggttgcatgctttttggcacaaaatgtgtttttttaaatagttctatgtcagcaactatggtttaaacttgtacgtttcctgcttgccatgcgtgccaaatccctgttttcctgacctgcactgcttgccaaccattccattgttttttacactgcactatgtgcaactactgaatcactatgtacattgtgtcatataaaataaatcactatgcgccaacgccttacataccgctgttaggcacatatttttggcttgttttaactaacctaattgcatatttggcataaggtttaaacttctaaggccaactaaatgtcaccctagttcatacatgaactgtgtaaaggttagtcatacattgttcatttgtaaaactgcacatgggtgtgtgcaaaccgttttgggttacacatttacaagcaacttatataataatactaaactacaataattcatgtataaaactaagggcgtaaccgaaatcggttgaaccgaaaccggttagtataaaagcagacattttatgcaccaaaagagaactgcaatgtttcaggacccacaggagcgacccagaaagttaccacagttatgcacagagctgcaaacaactatacatgatataatattagaatgtgtgtactgcaagcaacagttactgcgacgtgaggtatatgactttgcttttcgggatttatgcatagtatatagagatgggaatccatatgctgtatgtgataaatgtttaaagttttattctaaaattagtgagtatagacattattgttatagtgtgtatggaacaacattagaacagcaatacaacaaaccgttgtgtgatttgttaattaggtgtattaactgtcaaaagccactgtgtcctgaagaaaagcaaagacatctggacaaaaagcaaagattccataatataaggggtcggtggaccggtcgatgtatgtcttgttgcagatcatcaagaacacgtagagaaacccagctgtaatcatgcatggagatacacctacattgcatgaatatatgttagatttgcaaccagagacaactgatctctactgttatgagcaattaaatgacagctcagaggaggaggatgaaatagatggtccagctggacaagcagaaccggacagagcccattacaatattgtaaccttttgttgcaagtgtgactctacgcttcggttgtgcgtacaaagcacacacgtagacattcgtactttggaagacctgttaatgggcacactaggaattgtgtgccccatctgttctcagaaaccataatctacc

SEQ ID NO: 61 - DNA, 7906 bp, Homo sapiens
  source 1..7906: mol_type = genomic DNA; note = UNCseq2209
atggctgatcctgcaggtaccaatggggaagagggtacgggatgtaatggatggttttatgtagaggctgtagtggaaaaaaaaacaggggatgctatatcagatgacgagaacgaaaatgacagtgatacaggtgaagatttggtagattttatagtaaatgataatgattatttaacacaggcagaaacagagacagcacatgcgttgtttactgcacaggaagcaaaacaacatagagatgcagtacaggttctaaaacgaaagtatttgggtagtccacttagtgatattagtggatgtgtagacaataatattagtcctagattaaaagctatatgtatagaaaaacaaagtagagctgcaaaaaggagattatttgaaagcgaagacagcgggtatggcaatactgaagtggaaactcagcagatgttacaggtagaagggcgccatgagactgaaacaccatgtagtcagtatagtggtggaagtgggggtggttgcagtcagtacagtagtggaagtgggggagagggtgttagtgaaagacacactatatgccaaacaccacttacaaatattttaaatgtactaaaaactagtaatgcaaaggcagcaatgttagcaaaatttaaagagttatacggggtgagtttttcagaattagtaagaccatttaaaagtaataaatcaacgtgttgcgattggtgtattgctgcatttggacttacacccagtatagctgacagtataaaaacactattacaacaatattgtttatatttacacattcaaagtttagcatgttcatggggaatggttgtgttactattagtaagatataaatgtggaaaaaatagagaaacaattgaaaaattgctgtctaaactattatgtgtgtctccaatgtgtatgatgatagagcctccaaaattgcgtagtacagcagcagcattatattggtataaaacaggtatatcaaatattagtgaagtgtatggagacacgccagaatggatacaaagacaaacagtattacaacatagttttaatgattgtacatttgaattatcacagatggtacaatgggcctacgataatgacatagtagacgatagtgaaattgcatataaatatgcacaattggcagacactaatagtaatgcaagtgcctttctaaaaagtaattcacaggcaaaaattgtaaaggattgtgcaacaatgtgtagacattataaacgagcagaaaaaaaacaaatgagtatgagtcaatggataaaatatagatgtgatagggtagatgatggaggtgattggaagcaaattgttatgttcttaaggtatcaaggtgtagagtttatgtcatttttaactgcattaaaaagatttttgcaaggcatacctaaaaaaaattgcatattactatatggtgcagctaacacaggtaaatcattatttggtatgagtttaatgaaatttctgcaagggtctgtaatatgttttgtaaattctaaaagccatttttggttacaaccattagcagatgccaaaataggtatgttagatgatgctacagtgccctgttggaactacatagatgacaatttaagaaatgcattggatggaaatttagtttctatggatgtaaagcatagaccattggtacaactaaaatgccctccattattaattacatctaacattaatgctggtacagattctaggtggccttatttacataatagattggtggtgtttacatttcctaatgagtttccatttgacgaaaacggaaatccagtgtatgagcttaatgataagaactggaaatcctttttctcaaggacgtggtccagattaagtttgcacgaggacgaggacaaggaaaacgatggagactctttgccaacgtttaaatgtgtgtcaggacaaaatactaacacattatgaaaatgatagtacagacctacgtgaccatatagactattggaaacacatgcgcctagaatgtgctatttattacaaggccagagaaatgggatttaaacatattaaccaccaggtggtgccaacactggctgtatcaaagaataaagcattacaagccattgaactgcaactaacgttagaaacaatatataactcacaatatagtaatgaaaagtggacattacaagacgttagccttgaagtgtatttaactgcaccaacaggatgtataaaaaaacatggatatacagtggaagtgcagtttgatggagacatatgcaatacaatgcattatacaaactggacacatatatatatttgtgaagaagcatcagtaactgtggtagagggtcaagttgactattatggtttatattatgttcatgaaggaatacgaacatattttgtgcagtttaaagatgatgcagaaaaatatagtaaaaataaagtatgggaagttcatgcgggtggtcaggtaatattatgtcctacatctgtgtttagcagcaacgaagtatcctctcctgaaattattaggcagcacttggccaaccaccccgccgcgacccataccaaagccgtcgccttgggcaccgaagaaacacagacgactatccagcgaccaagatcagagccagacaccggaaacccctgccacaccactaagttgttgcacagagactcagtggacagtgctccaatcctcactgcatttaacagctcacacaaaggacggattaactgtaatagtaacactacacccatagtacatttaaaaggtgatgctaatactttaaaatgtttaagatatagatttaaaaagcattgtacattgtatactgcagtgtcgtctacatggcattggacaggacataatgtaaaacataaaagtgcaattgttacacttacatatgatagtgaatggcaacgtgaccaatttttgtctcaagttaaaataccaaaaactattacagtgtctactggatttatgtctatatgacaaatcttgatactgcatccacaacattactggcgtgctttttgctttgcttttgtgtgcttttgtgtgtctgcctattaatacgtccgctgcttttgtctgtgtctacatacacatcattaataatattggtattactattgtggataacagcagcctctgcgtttaggtgttttattgtatatattatatttgtttatataccattatttttaatacatacacatgcacgctttttaattacataatgtatatgtacataatgtaattgttacatataattgttgtataccataacttactattttttcttttttattttcatatataatttttttttttgtttgtttgtttgttttttaataaactgttattacttaacaatgcgacacaaacgttctgcaaaacgcacaaaacgtgcatcggctacccaactttataaaacatgcaaacaggcaggtacatgtccacctgacattatacctaaggttgaaggcaaaactattgctgatcaaatattacaatatggaagtatgggtgtattttttggtgggttaggaattggaacagggtcgggtacaggcggacgcactgggtatattccattgggaacaaggcctcccacagctacagatacacttgctcctgtaagaccccctttaacagtagatcctgtgggcccttctgatccttctatagtttctttagtggaagaaactagttttattgatgctggtgcaccaacatctgtaccttccattcccccagatgtatcaggatttagtattactacttcaactgataccacacctgctatattagatattaataatactgttactactgttactacacataataatcccactttcactgacccatctgtattgcagcctccaacacctgcagaaactggagggcattttacactttcatcatccactattagtacacataattatgaagaaattcctatggatacatttattgttagcacaaaccctaacacagtaactagtagcacacccataccagggtctcgcccagtggcacgcctaggattatatagtcgcacaacacaacaggttaaagttgtagaccctgcttttgtaaccactcccactaaacttattacatatgataatcctgcatatgaaggtatagatgtggataatacattatatttttctagtaatgataatagtattaatatagctccagatcctgactttttggatatagttgctttacataggccagcattaacctctaggcgtactggcattaggtacagtagaattggtaataaacaaacactacgtactcgtagtggaaaatctataggtgctaaggtacattattattatgatttaagtactattgatcctgcagaagaaatagaattacaaactataacaccttctacatatactaccacttcacatgcagcctcacctacttctattaataatggattatatgatatttatgcagatgactttattacagatacttctacaaccccggtaccatctgtaccctctacatctttatcaggttatattcctgcaaatacaacaattccttttggtggtgcatacaatattcctttagtatcaggtcctgatatacccattaatataactgaccaagctccttcattaattcctatagttccagggtctccacaatatacaattattgctgatgcaggtgacttttatttacatcctagttattacatgttacgaaaacgacgtaaacgtttaccatattttttttcagatgtctctttggctgcctagtgaggccactgtctacttgcctcctgtcccagtatctaaggttgtaagcacggatgaatatgttgcacgcacaaacatatattatcatgcaggaacatccagactacttgcagttggacatccctattttcctattaaaaaacctaacaataacaaaatattagttcctaaagtatcaggattacaatacagggtatttagaatacatttacctgaccccaataagtttggttttcctgacacctcattttataatccagatacacagcggctggtttgggcctgtgtaggtgttgaggtaggtcgtggtcagccattaggtgtgggcattagtggccatcctttattaaataaattggatgacacagaaaatgctagtgcttatgcagcaaatgcaggtgtggataatagagaatgtatatctatggattacaaacaaacacaattgtgtttaattggttgcaaaccacctataggggaacactggggcaaaggatccccatgtaccaatgttgcagtaaatccaggtgattgtccaccattagagttaataaacacagttattcaggatggtgatatggttgatactggctttggtgctatggactttactacattacaggctaacaaaagtgaagttccactggatatttgtacatctatttgcaaatatccagattatattaaaatggtgtcagaaccatatggcgacagcttatttttttatttacgaagggaacaaatgtttgttagacatttatttaatagggctggtactgttggtgaaaatgtaccagacgatttatacattaaaggctctgggtctactgcaaatttagccagttcaaattattttcctacacctagtggttctatggttacctctgatgcccaaatattcaataaaccttattggttacaacgagcacagggccacaataatggcatttgttggggtaaccaactatttgttactgttgttgatactacacgcagtacaaatatgtcattatgtgctgccatatctacttcagaaactacatataaaaatactaactttaaggagtacctacgacatggggaggaatatgatttacagtttatttttcaactgtgcaaaataaccttaactgcagacgttatgacatacatacattctatgaattccactattttggaggactggaattttggtctacaacctcccccaggaggcacactagaagatacttataggtttgtaacatcccaggcaattgcttgtcaaaaacatacacctccagcacctaaagaagatccccttaaaaaatacactttttgggaagtaaatttaaaggaaaagttttctgcagacctagatcagtttcctttaggacgcaaatttttactacaagcaggattgaaggccaaaccaaaatttacattaggaaaacgaaaagctacacccaccacctcatctacctctacaactgctaaacgcaaaaaacgtaagctgtaagtattgtatgtatgttgaattagtgttgtttgttgtgtatatgtttgtatgtgcttgtatgtgcttgtaaatattaagttgtatgtgtgtttgtatgtatggtataataaacacgtgtgtatgtgtttttaaatgcttgtgtaactattgtgtcatgcaacataaataaacttattgtttcaacacctactaattgtgttgtggttattcattgtatataaactatatttgctacatcctgtttttgttttatatatactatattttgtagcgccagcggccattttgtagcttcaaccgaattcggttgcatgctttttggcacaaaatgtgtttttttaaatagttctatgtcagcaactatggtttaaacttgtacgtttcctgcttgccatgcgtgccaaatccctgttttcctgacctgcactgcttgccaaccattccattgttttttacactgcactatgtgcaactactgaatcactatgtacattgtgtcatataaaataaatcactatgcgccaacgccttacataccgctgttaggcacatatttttggcttgttttaactaacctaattgcatatttggcataaggtttaaacttctaaggccaactaaatgtcaccctagttcatacatgaactgtgtaaaggttagtcatacattgttcatttgtaaaactgcacatgggtgtgtgcaaaccgttttgggttacaaatttacaagcaacttatataataatactaaactacaataattcatgtataaaactaagggcgtaaccgaaatcggttgaaccgaaaccggttagtataaaagcagacattttatgcaccaaaagagaactgcaatgtttcaggacccacaggagcgacccagaaagttaccacagttatgcacagagctgcaaacaactatacatgatataatattagaatgtgtgtactgcaagcaacagttactgcgacgtgaggtatatgactttgcttttcgggatttatgcatagtatatagagatgggaatccatatgctgtatgtgataaatgtttaaagttttattctaaaattagtgagtatagacattattgttatagtttgtatggaacaacattagaacagcaatacaacaaaccgttgtgtgatttgttaattaggtgtattaactgtcaaaagccactgtgtcctgaagaaaagcaaagacatctggacaaaaagcaaagattccataatataaggggtcggtggaccggtcgatgtatgtcttgttgcagatcatcaagaacacgtagagaaacccagctgtaatcatgcatggagatacacctacattgcatgaatatatgttagatttgcaaccagagacaactgatctctactgttatgagcaattaaatgacagctcagaggaggaggatgaaatagatggtccagctggacaagcagaaccggacagagcccattacaatattgtaaccttttgttgcaagtgtgactctacgcttcggttgtgcgtacaaagcacacacgtagacattcgtactttggaagacctgttaatgggcacactaggaattgtgtgccccatctgttctcagaaaccataatctacc

SEQ ID NO: 62 - DNA, 7906 bp, Homo sapiens
  source 1..7906: mol_type = genomic DNA; note = UNCseq2234
atggctgatcctgcaggtaccaatggggaagagggtacgggatgtaatggatggttttatgtagaggctgtagtggaaaaaaaaacaggggatgctatatcagatgacgagaacgaaaatgacagtgatacaggtgaagatttggtagattttatagtaaatgataatgattatttaacacaggcagaaacagagacagcacatgcgttgtttactgcacaggaagcaaaacaacatagagatgcagtacaggttctaaaacgaaagtatttgggtagtccacttagtgatattagtggatgtgtagacaataatattagtcctagattaaaagctatatgtatagaaaaacaaagtagagctgcaaaaaggagattatttgaaagcgaagacagcgggtatggcaatactgaagtggaaactcagcagatgttacaggtagaagggcgccatgagactgaaacaccatgtagtcagtatagtggtggaagtgggggtggtagcagtcagtacagtagtggaagtgggggagagggtgttagtgaaagacatactatatgcgaaacaccacttacaaatattttaaatgtactaaaaactagtaatgcaaaggcagcaatgttagcaaaatttaaagagttatacggggtgagtttttcagaattagtaagaccatttaaaagtaataaatcaacgtgttgcgattggtgtattgctgcatttggacttacacccagtatagctgacagtataaaaacactattacaacaatattgtttatatttacacattcaaagtttagcatgttcatggggaatggttgtgttactattagtaagatataaatgtggaaaaaatagagaaacaattgaaaaattgctgtctaaactattatgtgtgtctccaatgtgtatgatgatagagcctccaaaattgcgtagtacagcagcagcattatattggtataaaacaggtatgtcaaatattagtgaagtgtatggagacacgccagaatggatacaaagacaaacagtattacaacatagttttaatgattgtacatttgaattatcacagatggtacaatgggcctacgataatgacatagtagacgatagtgaaattgcatataaatatgcacaattggcagacactaatagtaatgcaagtgcctttctaaaaagtaattcacaggcaaaaattgtaaaggattgtgcaacaatgtgtagacattataaacgagcagaaaaaaaacaaatgagtatgagtcaatggataaaatatagatgtgatagggtagatgatggaggtgattggaagcaaattgttatgtttttaaggtatcaaggtgtagactttatgtcatttttaagtgcattaaaaaaatttctgcaaggcatacctaaaaaaaattgcatattactatatggtgcagctaacacaggtaaatcattatttggtatgagtttaatgaaatttctgcaagggtccgtaatatgttttgtaaattctaaaagccatttttggttacaaccattagcagatgccaaaataggtatgttagatgatgctacagtgccctgttggaactacatagatgacaatttaagaaatgcattggatggaaatttagtttctatggatgtaaagcatagaccattggtacaactaaaatgccctccattattaattacatctaacattaatgctggtacagattccaggtggccttatttacataatcgattggtggtgtttacatttcctaatgagtttccatttgacgaaaacggaaatccagtgtatgagcttaatgataagaactggaaatcctttttctcaaggacgtggtccagattaagtttgcacgaggacgaggacaaggaaaacgatggagactctttgccaacgtttaaatgtgtgtcaggacaaaatactaacacattatgaaaatgatagtacagacctacgtgaccatatagactattggaaacacatgcgcctagaatgtgctatttattacaaggccagagaaatgggatttaaacatattaaccaccaggtggtgccaacactggctgtatcaaagaataaagcattacaagcaattgaactgcaactaacgttagaaacaatatataactcacaatatagtaatgaaaagtggacattacaagacgttagccttgaagtgtatttaactgcaccaacaggatgtataaaaaaacatggatatacagtggaagtgcagtttgatggagacatatgcaatacaatgcattatacaaactggacacatatatatatttgtgaagacgcatcagtaactgtggtagagggtcaagttgactattatggtttatattatgttcatgaaggaatacgaacatattttgtgcagtttaaagatgatgcagaaaaatatagtaaaaataaagtatgggaagttcatgcgggtggtcaggtaatattatgtcctacatctgtgtttagcagcaacgaagtatcctctgctgaaattattaggcagcacttggccaaccactccgccgcgacccataccaaagccgtcgccttgggcaccgaagaaacacagacgactatccagcgaccaagagcagagccagacaccggaaacccctgccacaccaacaagttgttgcacagagactccgtggacagtgctccaatcctcactgcagttaacagctcacacaaaggacggattaactgtaatagtaacactacacccatagtacatttaaaaggtgatgctaatactttaaaatgtttaagatatagatttaaaaagcattgtaaattgtatacagcagtgtcgtccacatggcattggacaggacataatgtaaaacataaaagtgcaattgttacacttacatatgatagtgaatggcaacgtgaccaatttttgtctcaagtgaaaataccaaaaactattacagtgtctactggatttatgtctatatgacaaatcttgatactgcatccacaacattactggcgtgctttttgctttgcttttgtgtgcttttgtgtgtctgcctattaatacgtccgctgcttttgtctgtgtctacatacacatcattaatactattggtattattattgtggataacagcagcctctgcgtttaggtgttttattgtatatattgtatttgtttatataccattatttttaatacatacacatgcacgcttcttaattacataatgtatatgtacataatgtaattgttacatataattgttgtataccatcacttactgatttttcttttgtatttttatatataatttttttttttgtttgtttgtttgttttttaataaactgttattacttaacaatgcgacacaaacgttctgcaaaacgcacaaaacgtgcatcggccacccaactttataaaacatgcaaacaggcaggtacatgtccacctgacattatacctaaggttgaaggcaaaactattgctgatcaaatattacaatatggaagtatgggtgtattttttggtgggttaggaattggaacagggtcgggtacaggcggacgcactgggtatattccattgggaacaaggcctcccacagctacagatacacttgctcctgtaagaccccctttaacggtagatcctgtgggcccttctgatccgtctatagtttctttagtggaagaaactagttttattgatgctggtgcaccaacatctgtaccttccattcccccagatgtatcaggatttagtattactacttcaactgataccacacctgctatattagatattaataatactgttactactgttactacacataataatcccactttcactgacccatctgtattgcagcctccaacacctgcagaaactggagggcattttacactttcatcatccactattagtacacataattatgaagaaattcctatggatacatttattgttagcacaaaccctaacacagtaactagtagcacacccataccggggtctcgcccagtggcacgcctaggattatatagtcgcacaacacaacaggttaaagttgtagaccctgcttttgtaaccactcccactaaacttattacatatgataatcctgcatatgaaggtatagatgtggataatacattatattttcctagtaatgataatagtattaatatagctccagatcctgactttttggatatagttgctttacataggccagcattaacctctaggcgtactggcattagatacagtagaattggtaataaacaaacactacgtactcgtagtggaaaatctataggtgctaaggtacattattattatgatttaagtactattgatcctgcagaagaaatagaattgcaaactataacaccttctacatatactaccccttcacatgcagcctcacctacttctattaataatggattatatgatatttatgcagatgactttattacagatacttctacaaccccagtaccatctgtaccctctacatccttatcaggttatattcctgcaaatacaacaattccttttggtggtgcatacaatattcctttagtatcaggtcctgatatacctattaatacaactgaccaaactccttcattaattcctatagttccagggtctccacaatatacaattattgctgatgcaggtgacttttatttacatcctagttattacatgttacgaaaacgacgtaaacgtttaccatattttttttcagatgtctctttggctgcctagtgaggccactgtctacttgcctcctgtcccagtatctaaggttgtaagcacggatgaatatgttgcacgcacaaacatatattatcatgcaggaacatccagactacttgcagttggacatccctattttcctattaaaaaacctaacaataacaaaatattagttcctaaagtatcaggattacaatacagggtatttagaatacatttacctgaccccaataagtttggttttcctgacacctcattttacaatccagatacacagcggctggtttgggcctgtgtaggtgttgaggtaggtcgtggtcagccattaggtgtgggcattagtggccatcctttattaaataaattggatgacacagaaaatgctagtgcttatgcagcaaatgcaggtgtggataatagagaatgtatatctatggattacaaacaaacacaattgtgtttaattggttgcaaaccacctataggggaacactggggcaaaggatccccatgtaacaatgttgcagtaaatccaggtgattgtccaccattagagttaataaacacagttattcaggatggtgatatggttgatactggctttggtgctatggactttactacattacaggctaacaaaagtgaagttccactggatatttgtacgtctatttgcaaatatccagattatattaaaatggtgtcagaaccatatggcgacagcttatttttttatttacgaagggaacaaatgtttgttagacatttatttaatagggctggtgctgttggtgaaaatgtaccagacgatttatacattaaaggctctgggcctactgcaaatttagccagttcaaattattttcctacacctagtggttctatggttacctctgatgcccaaatattcaataaaccttattggttacaacgagcacagggccacaataatggcatttgttggggtaaccaactatttgttactgttgttgatactacacgcagtacaaatatgtcattatgtgctgccatatctacttcagaacctacatataaaaatactaactttaaggagtacctacgacatggggaggaatatgatttacagtttatttttcaactgtgcaaaataaccttaactgcagacgttatgacatacatacattctatgaattccactattttggaggactggaattttggtctacaacctcccccaggaggcacactagaagatacttataggtttgtaacatcccaggcaattgcttgtcaaaaacatacacctccagcacctaaagaagatccccttaaaaaatacactttttgggaagtaaatttaaaggaaaagttttctgcagacctagatcagtttcctttaggacgcaaatttttactacaagcaggattgaaggccaaaccaaaatttacattaggaaaacgaaaagctacacccaccacctcatctacctctacaactgctaaacgcaaaaaacgtaagctgtaagtattgtatgtatgttgaattagtgttgtttgttgtgtatatgtttgtatgtgcttgtatgtgcttgtaaatattacgttgtatgtgtgtttgtatgtatggtataataaacacgtgtgtatgtggttttaaatgcttgtgtaactattgtgtcatgcaacataaataaacttattgtttcaacacctactaattgtgttgtggttattcattgtctataaactatatttgctacatcctgtttttgttttatatatactatattttgtagcgccagcagccattttgtagcttcaaccgaattcggttgcatgctttttggcacaaactgtatttttttaaatagttctatgtcagcaactatggtttaaacttgtacgtttcctgcttgccatgcgtgccaaatccctgttttcctgacctgcactgcttgccaaccattccattgttttttacactgcactatgtgcaactactgaatcactatgtacattgtgtcatataaaataaattactatgcgccaacgccttacataccgctgttaggcacatatttttggcttgttttaactaacctaattgcatatttggcataaggtttaaacttctaaggccaactaaatgtcaccctagttcatacatgaactgtgtaaaggttagtcatacattattcatttttacagctgcacatgggtgtgtgcaaaccgttttgggttacacatttacaagcaacttatataataatactaaactacaataattcatgtataaaactaagggcgtaaccgaaatcggttgaaccgaaaccggttagtataaaagcagacattttatgcaccaaaagagaactgcaatgttccaggacccacaggagcgacccagaaagttaccacagttatgcacagagctgcaaacaactatacatgatataatattagaatgtgtgtactgcaagcaacagttactgcgacgtgaggtatatgactttgcttttcgggatttatgcatagtatatagagatgggaatccatatgctgtatgtgagaaatgtttaaagttttattctaaaattagtgagtatagacattattgttatagtttgtatggaacaacattagaacagcaatacaacaaaccgttgtgtgatttgttaattaggtgtattaactgtcaaaagccactgtgtcctgaagaaaagcaaagacatctggacaaaaagcaaagattccataatataaggggtcggtggaccggtcgatgtatgtcttgttgcagatcatcaagaacacgtagagaaacccagctgtaatcatgcatggagatacacctacattgcatgaatatatgttagatttgcaaccagagacaactgatctctactgttatgagcaattaaatgacagctcagaggaggaggatgaaatagatggtccagctggacaagcagaaccggacagagcccattacaatattgtaaccttttgttgcaagtgtgactctacgcttcggttgtgcgtacaaagcacacacgtagacattcgtacgttggaagacctgttaatgggcacactaggaattgtgtgccccatctgttctcagaaaccataatctacc

SEQ ID NO: 63 - DNA, 7906 bp, Homo sapiens
  source 1..7906: mol_type = genomic DNA; note = UNCseq2249
atggctgatcctgcaggtaccaatggggaagagggtacgggatgtaatggatggttttatgtagaggctgtagtggaaaaaaaaacaggggatgctatatcagatgacgagaacgaaaatgacagtgatacaggtgaagatttggtagattttatagtaaatgataatgattatttaacacaggcagaaacagagacagcacatgcgttgtttactgcacaggaagcaaaacaacatagagatgcagtacaggttctaaaacgaaagtatttgggtagtccacttagtgatattagtggatgtgtagacaataatattagtcctagattaaaagctatatgtatagaaaaacaaagtagagctgcaaaaaggagattatttgaaagcgaagacagcgggtatggcaatactgaagtggaaactcagcagatgttacaggtagaagggcgccatgagactgaaacaccatgtagtcagtatagtggtggaagtgggggtggttgcagtcagtacagtagtggaagtgggggagagggtgttagtgaaagacacactatatgccaaacaccacttacaaatattttaaatgtactaaaaactagtaatgcaaaggcagcaatgttagcaaaatttaaagagttatacggggtgagttttacagaattagtaagaccatttaaaagtaataaatcaacgtgttgcgattggtgtattgctgcatttggacttacacccagtatagctgacagtataaaaacactattacaacaatattgtttatatttacacattcaaagtttagcatgttcatggggaatggttgtgttactattagtaagatataaatgtggaaaaaatagagaaacaattgaaaaattgctgtctaaactattatgtgtgtctccaatgtgtatgatgatagagcctccaaaattgcgtagtacagcagcagcattatattggtataaaacaggtatatcaaatattagtgaagtgtatggagacacgccagaatggatacaaagacaaacagtattacaacatagttttaatgattgtacatttgaattatcacagatggtacaatgggcctacgataatgacatagtagacgatagtgaaattgcatataaatatgcacaattggcagacactaatagtaatgcaagtgcctttctaaaaagtaattcacaggcaaaaattgtaaaggattgtgcaacaatgtgtagacattataaacgagcagaaaaaaaacaaatgagtatgagtcaatggataaaatatagatgtgatagggtagatgatggaggtgattggaagcaaattgttatgtttttaaggtatcaaggtgtagagtttatgtcatttttaactgcattaaaaagatttttgcaaggcatacctaaaaaaaattgcatattactatatggtgcagctaacacaggtaaatcattatttggtatgagtttaatgaaatttctgcaagggtctgtaatatgttttgtaaattctaaaagccatttttggttacaaccattagcagatgccaaaataggtatgttagatgatgctacagtgccctgttggaactatatagatgacaatttaagaaatgcattggatggaaatttagtttctatggatgtaaagcatagaccattggtacaactaaaatgccctccattattaattacatctaacattaatgctggtacagattctaggtggccttatttacataatagattggtggtgtttacatttcctaatgagtttccatttgacgaaaacggaaatccagtgtatgagcttaatgataagaactggaaatcctttttctcaaggacgtggtccagattaagtttgcacgaggacgaggacaaggaaaacgatggagactctttgccaacgtttaaatgtgtgtcaggacaaaatactaacacattatgaaaatgatagtacagacctacgtgaccatatagactattggaaacacatgcgcctagaatgtgctatttattacaaggccagagaaatgggatttaaacatattaaccaccaggtggtgccaacgctggctgtatcaaagaataaagcattacaagcaattgaactgcaactaacgttagaaacaatatataactcacaatatagtaatgaaaagtggacattacaagacgttagccttgaagtgtatttaactgcaccaacaggatgtataaaaaaacatggatatacagtggaagtgcagtttgatggagacatatgcaatacaatgcattatacaaactggacacatatatatatttgtgaagaagcatcagtaactgtggtagagggtcaagttgactattatggtttatattatgttcatgaaggaatacgaacatattttgtgcagtttaaagatgatgcagaaaaatatagtaaaaataaagtatgggaagttcatgcgggtggtcaggtaatattatgtcctacatctgtgtttagcagcaacgaagtatcctctcctgaaattattaggcagcacttggccaaccactccgccgcgacccataccaaagccgtcgccttgggcaccgaagaaacacagacgactatccagcgaccaagatcagagccagacaccggaaacccctgccacaccactaagttgttgcacagagactcagtggacagtgctccaatcctcactgcatttaacagctcacacaaaggacggattaactgtaatagtaacactacacccatagtacatttaaaaggtgatgctaatactttaaaatgtttaagatatagatttaaaaagcattgtaaattgtatactgcagtgtcgtctacatggcattggacaggacataatgtaaaacataaaagtgcaattgttacacttacatatgatagtgaatggcaacgtgaccaatttttgtctcaagttaaaataccaaaaactattacagtgtctactggatttatgtctatatgacaaatgttgatactgcatccacaacattactggcgtgctttttgctttgcttttgtgtgcttttgtgtgtctgcctattaatacgtccgctgcttttgtctgtgtctacatacacatcattaatactattggtattactattgtggataacagcagcctctgcgtttaggtgttttattgtatatattgtatttgtttatataccattatttttaatacatacacatgcacgctttttaattacataatgtatatgtacataatgtaattgttacatataattgttgtataccataacttactattttttcttttttatttttatatataatttttttttttgtttgtttgtttgttttttaataaactgttattacttaacaatgcgacacaaacgttctgcaaaacgcacaaaacgtgcatcggctacccaactttataaaacatgcaaacaggcaggtacatgtccacctgacattatacctaaggttgaaggcaaaactattgctgatcaaatattacaatatggaagtatgggtgtattttttggtgggttaggaattggaacagggtcgggtacaggcggacgcactgggtatattccattgggaacaaggcctcccacagctacagatacacttgctcctgtaagaccccctttaacagtagatcctgtgggcccttctgatccttctatagtttctttagtggaagaaactagttttattgatgctggtgcaccaacatctgtaccttccatccccccagatgtatcaggatttagtattactacttcaactgataccacacctgctatattagatattaataatactgttactactgttactacacataataatcccactttcactgacccatctgtattgcagcctccaacacctgcagaaactggagggcattttacactttcatcatccactattagtacacataattatgaagaaattcctatggatacatttattgttagcacaaaccctaacacagtaactagtagcacacccataccagggtctcgcccagtggcacgcctaggattatatagtcgcacaacacaacaagttaaagttgtagaccctgcttttgtaaccactcccactaaacttattacatatgataatcctgcatatgaaggtatagatgtggataatacattatattttcctagtaatgataatagtattaatatagctccagatcctgactttttggatatagttgctttacataggccagcattaacctctaggcgtactggcattaggtacagtagaattggtaataaacaaacactacgtactcgtagtggaaaatctataggtgctaaggtacattattattatgatttgagtactattgatcctgcagaagaaatagaattacaaactataacaccttctacatatactaccacttcacatgcagcctcacctacttctattaataatggattatatgatatttatgcagatgactttattacagatacttctacaaccccggtaccatctgtaccctctacatctttatcaggttatattcctgcaaatacaacaattccttttggtggtgcatacaatattcctttagtatcaggtcctgatatacccattaatataactgaccaagctccttcattaattcctatagttccagggtctccacaatatacaattattgctgatgcaggtgacttttatttacatcctagttattacatgttacgaaaacgacgtaaacgtttaccatattttttttcagatgtctctttggctgcctagtgaggccactgtctacttgcctcctgtcccagtatctaaggttgtaagcacggatgaatatgttgcacgcacaaacatatattatcatgcaggaacatccagactacttgcagttggacatccctattttcctattaaaaaacctaacaataacaaaatattagttcctaaagtatcaggattacaatacagggtatttagaatacatttacctgaccccaataagtttggttttcctgacacctcattttataatccagatacacagcggctggtttgggcctgtgtaggtgttgaggtaggtcgtggtcagccattaggtgtgggcattagtggccatcctttattaaataaattggatgacacagaaaatgctagtgcttatgcagcaaatgcaggtgtggataatagagaatgtatatctatggattacaaacaaacacaattgtgtttaattggttgcaaaccacctataggggaacactggggcaaaggatccccatgtaccaatgttgcagtaagtccaggtgattgtccaccattagagttaataaacacagttattcaggatggtgatatggttgatactggctttggtgctatggactttactacattacaggctaacaaaagtgaagttccactggatatttgtacatctatttgcaaatatccagattatattaaaatggtgtcagaaccatatggcgacagcttatttttttatttacgaagggaacaaatgtttgttagacatttatttaatagggctggtgctgttggtgaaaatgtaccagacgatttatacattaaaggctctgggtctactgcaaatttagccagttcaaattattttcctacacctagtggttctatggttacctctgatgcccaaatattcaataaaccttattggttacaacgagcacagggccacaataatggcatttgttggggtaaccaactatttgttactgttgttgatactacacgcagtacaaatatgtcattatgtgctgccatatctacttcagaaactacatataaaaatactaactttaaggagtacctacgacatggggaggaatatgatttacagtttatttttcaactgtgcaaaataaccttaactgcagacgttatgacatacatacattctatgaattccactattttggaggactggaattttggtctacaaccccccccaggaggcacactagaagatacttataggtttgtaacatcccaggcaattgcttgtcaaaaacatacacctccagcacctaaagaagatccccttaaaaaatacactttttgggaagtaaatttaaaggaaaagttttctgcagacctagatcagtttcctttaggacgcaaatttttactacaagcaggattgaaggccaaaccaaaatttacattaggaaaacgaaaagctacacccaccacctcatctacctctacaactgctaaacgcaaaaaacgtaagctgtaagtattgtatgtatgttgaattagtgttgtttgttgtgtatatgtttgtatgtgcttgtatgtgcttgtaaatattaagttgtatgtgtgtttgtatgtatggtataataaacacgtgtgtatgtgtttttaaatgcttgtgtaactattgtgtgatgcaacataaataaacttattgtttcaacacctactaattgtgttgtggttattcattgtatataaactatatttgctacatcctgtttttgttttatatatactatattttgtagcgccagcggccattttgtagcttcaaccgaattcggttgcatgctttttggcacaaaatgtgtttttttaaatagttctatgtcagcaactatggtttaaacttgtacgtttcctgcttgccatgcgtgccaaatccctgttttcctgacctgcactgcttgccaaccattccattgttttttacactgcactatgtgcaactactgaatcactatgtacattgtgtcatataaaataaatcactatgcgccaacgccttacataccgctgttaggcacatatttttggcttgttttaactaacctaattgcatatttggcataaggtttaaacttctaaggccaactaaatgtcaccctagttcatacatgaactgtgtaaaggttagtcatacattgttcatttgtaaaactgcacatgggtgtgtgcaaaccgttttaggttacacatttacaagcaacttatataataatactaaactacaataatccatgtataaaactaagggcgtaaccgaaatcggttgaaccgaaaccggttagtataaaagcagacattttatgcaccaaaagagaactgcaatgtttcaggacccacaggagcgacccagaaagttaccacagttatgcacagagctgcaaacaactatacatgatataatattagaatgtgtgtactgcaagcaacagttactgcgacgtgaggtatatgactttgcttttcgggatttatgcatagtatatagagatgggaatccatatgctgtatgtgataaatgtttaaagttttattctaaaattagtgagtatagacattattgttatagtgtgtatggaacaacattagaacagcaatacaacaaaccgttgtgtgatttgttaattaggtgtattaactgtcaaaagccactgtgtcctgaagaaaagcaaagacatctggacaaaaagcaaagattccataatataaggggtcggtggaccggtcgatgtatgtcttgttgcagatcatcaagaacacgtagagaaacccagctgtaatcatgcatggagatacacctacattgcatgaatatatgttagatttgcaaccagagacaactgatctctactgttatgagcaattaaatgacagctcagaggaggaggatgaaatagatggtccagctggacaagcagaaccggacagagcccattacaatattgtaaccttttgttgcaagtgtgactctacgcttcggttgtgcgtacaaagcacacacgtagacattcgtactttggaagacctgttaatgggcacactaggaattgtgtgccccatctgttctcagaaaccataatctacc

SEQ ID NO: 64 - DNA, 7906 bp, Homo sapiens
  source 1..7906: mol_type = genomic DNA; note = UNCseq2253
atggctgatcctgcaggtaccaatggggaagagggtacgggatgtaatggatggttttatgtagaggctgtagtggaaaaaaaaacaggggatgctatatcagatgacgagaacgaaaatgacagtgatacaggtgaagatttggtagattttatagtaaatgataatgattatttaacacaggcagaaacagagacagcacatgcgttgtttactgcacaggaagcaaaacaacatagagatgcagtacaggttctaaaacgaaagtatttgggtagtccacttagtgatattagtggatgtgtagacaataatattagtcctagattaaaagctatatgtatagaaaaacaaagtagagctgcaaaaaggagattatttgaaagcgaagacagcgggtatggcaatactgaagtggaaactcagcagatgttacaggtagaagggcgccatgagactgaaacaccatgtagtcagtatagtggtggaagtgggggtggttgcagtcagtacagtagtggaagtgggggagagggtgttagtgaaagacacactatatgccaaacaccacttacaaatattttaaatgtactaaaaactagtaatgcaaaggcagcaatgttagcaaaatttaaagagttatacggggtgagttttacagaattagtaagaccatttaaaagtaataaatcaacgtgttgcgattggtgtattgctgcatttggacttacacccagtatagctgacagtataaaaacactattacaacaatattgtttatatttacacattcaaagtttagcatgttcatggggaatggttgtgttactattagtaagatataaatgtggaaaaaatagagaaacaattgaaaaattgctgtctaaactattatgtgtgtctccaatgtgtatgatgatagagcctccaaaattgcgtagtacagcagcagcattatattggtataaaacaggtatatcaaatattagtgaagtgtatggagacacgccagaatggatacaaagacaaacagtattacaacatagttttaatgattgtacatttgaattatcacagatggtacaatgggcctacgataatgacatagtagacgatagtgaaattgcatataaatatgcacaattggcagacactaatagtaatgcaagtgcctttctaaaaagtaattcacaggcaaaaattgtaaaggattgtgcaacaatgtgtagacattataaacgagcagaaaaaaaacaaatgagtatgagtcaatggataaaatatagatgtgatagggtagatgatggaggtgattggaagcaaattgttatgtttttaaggtatcaaggtgtagagtttatgtcatttttaactgcattaaaaagatttttgcaaggcatacctaaaaaaaattgcatattactatatggtgcagctaacacaggtaaatcattatttggtatgagtttaatgaaatttctgcaagggtctgtaatatgttttgtaaattctaaaagccatttttggttacaaccattagcagatgccaaaataggtatgttagatgatgctacagtgccctgttggaactacatagatgacaatttaagaaatgcattggatggaaatttagtttctatggatgtaaagcatagaccattggtacaactaaaatgccctccattattaattacatctaacattaatgctggtacagattctaggtggccttatttacataatagattggtggtgtttacatttcctaatgagtttccatttgacgaaaacggaaatccagtgtatgagcttaatgataagaactggaaatcctttttctcaaggacgtggtccagattaagtttgcacgaggacgaggacaaggaaaacgatggagactctttgccaacgtttaaatgtgtgtcaggacaaaatactaacacattatgaaaatgatagtacagacctacgtgaccatatagactattggaaacacatgcgcctagaatgtgctatttattacaaggccagagaaatgggatttaaacatattaaccaccaggtggtgccaacactggctgtatcaaagaataaagcattacaagcaattgaactgcaactaacgttagaaacaatatataactcacaatatagtaatgaaaagtggacattacaagacgttagccttgaagtgtatttaactgcaccaacaggatgtataaaaaaacatggatatacagtggaagtgcagtttgatggagacatatgcaatacaatgcattatacaaactggacacatatatatatttgtgaagaagcatcagtaactgtggtagagggtcaagttgactattatggtttatattatgttcatgaaggaatacgaacatattttgtgcagtttaaagatgatgcagaaaaatatagtaaaaataaagtatgggaagttcatgcgggtggtcaggtaatattatgtcctacatctgtgtttagcagcaacgaagtatcctctcctgaaattattaggcagcacttggccaaccaccccgccgcgacccataccaaagccgtcgccttgggcaccgaagaaacacagacgactatccagcgaccaagatcagagccagacaccggaaacccctgccacaccactaagttgttgcacagagactcagtggacagtgctccaatcctcactgcatttaacagctcacacaaaggacggattaactgtaatagtaacactacacccatagtacatttaaaaggtgatgctaatactttaaaatgtttaagatatagatttaaaaagcattgtacattgtatactgcagtgtcgtctacatggcattggacaggacataatgtaaaacataaaagtgcaattgttacacttacatatgatagtgaatggcaacgtgaccaatttttgtctcaagttaaaataccaaaaactattacagtgtctactggatttatgtctatatgacaaatcttgatactgcatccacaacattactggcgtgctttttgctttgcttttgtgtgcttttgtgtgtctgcctattaatacgtccgctgcttttgtctgtgtctacatacacatcattaatactattggtattactattgtggataacagcagcctctgcgtttaggtgttttattgtatatattgtatttgtttatataccattatttttaatacatacacatgcacgctttttaattacataatgtatatgtacataatgtaattgttacatataattgttgtataccataacttactattttttcttttttattttcatatataatttttttttttgtttgtttgtttgttttttaataaactgttattacttaacaatgcgacacaaacgttctgcaaaacgcacaaaacgtgcatcggctacccaactttataaaacatgcaaacaggcaggtacatgtccacctgacattatacctaaggttgaaggcaaaactattgctgatcaaatattacaatatggaagtatgggtgtattttttggtgggttaggaattggaacagggtcgggtacaggcggacgcactgggtatattccattgggaacaaggcctcccacagctacagatacacttgctcctgtaagaccccctttaacagtagatcctgtgggcccttctgatccttctatagtttctttagtggaagaaactagttttattgatgctggtgcaccaacatctgtaccttccattcccccagatgtatcaggatttagtattactacttcaactgataccacacctgctatattagatattaataatactgttactactgttactacacataataatcccactttcactgacccatctgtattgcagcctccaacacctgcagaaactggagggcattttacactttcatcatccactattagtacacataattatgaagaaattcctatggatacatttattgttagcacaaaccctaacacagtaactagtagcacacccataccagggtctcgcccagtggcacgcctaggattatatagtcgcacaacacaacaggttaaagttgtagaccctgcttttgtaaccactcccactaaacttattacatatgataatcctgcatatgaaggtatagatgtggataatacattatatttttctagtaatgataatagtattaatatagctccagatcctgactttttggatatagttgctttacataggccagcattaacctctaggcgtactggcataaggtacagtagaattggtaataaacaaacactacgtactcgtagtggaaaatctataggtgctaaggtacattattattatgatttaagtactattgatcctgcagaagaaatagaattacaaactataacaccttctacatatactaccacttcacatgcagcctcacctacttctattaataatggattatatgatatttatgcagatgactttattacagatacttctacaaccccggtaccatctgtaccctctacatctttatcaggttatattcctgcaaatacaacaattccttttggtggtgcatacaatattcctttagtatcaggtcctgatatacccattaatataactgaccaagctccttcattaattcctatagttccagggtctccacaatatacaattattgctgatgcaggtgacttttatttacatcctagttattacatgttacgaaaacgacgtaaacgtttaccatattttttttcagatgtctctttggctgcctagtgaggccactgtctacttgcctcctgtcccagtatctaaggttgtaagcacggatgaatatgttgcacgcacaaacatatattatcatgcaggaacatccagactacttgcagttggacatccctattttcctattaaaaaacctaacaataacaaaatattagttcctaaagtatcaggattacaatacagggtatttagaatacatttacctgaccccaataagtttggttttcctgacacctcattttataatccagatacacagcggctggtttgggcctgtgtaggtgttgaggtaggtcgtggtcagccattaggtgtgggcattagtggccatcctttattaaataaattggatgacacagaaaatgctagtgcttatgcagcaaatgcaggtgtggataatagagaatgtatatctatggattacaaacaaacacaattgtgtttaattggttgcaaaccacctataggggaacactggggcaaaggatccccatgtaccaatgttgcagtaaatccaggtgattgtccaccattagagttaataaacacagttattcaggatggtgatatggttgatactggctttggtgctatggactttactacattacaggctaacaaaagtgaagttccactggatatttgtacatctatttgcaaatatccagattatattaaaatggtgtcagaaccatatggcgacagcttatttttttatttacgaagggaacaaatgtttgttagacatttatttaatagggctggtgctgttggtgaaaatgtaccagacgatttatacattaaaggctctgggtctactgcaaatttagccagttcaaattattttcctacacctagtggttctatggttacctctgatgcccaaatattcaataaaccttattggttacaacgagcacagggccacaataatggcatttgttggggtaaccaactatttgttactgttgttgatactacacgcagtacaaatatgtcattatgtgctgccatatctacttcagaaactacatataaaaatactaactttaaggagtacctacgacatggggaggaatatgatttacagtttatttttcaactgtgcaaaataaccttaactgcagacgttatgacatacatacattctatgaattccactattttggaggactggaattttggtttacaacctcccccaggaggcacactagaagatacttataggtttgtaacatcccaggcaattgcttgtcaaaaacatacacctccagcacctaaagaagatccccttaaaaaatacactttttgggaagtaaatttaaaggaaaagttttctgcagacctagatcagtttcctttaggacgcaaatttttactacaagcaggattgaaggccaaaccaaaatttacattaggaaaacgaaaagctacacccaccacctcatctacctctacaactgctaaacgcaaaaaacgtaagctgtaagtattgtatgtatgttgaattagtgttgtttgttgtgtatatgtttgtatgtgcttgtatgtgcttgtaaatattaagttgtatgtgtgtttgtatgtatggtataataaacacgtgtgtatgtgtttttaaatgcttgtgtaactattgtgtcatgcaacataaataaacttattgtttcaacacctactaattgtgttgtggttattcattgtatataaactatatttgctacatcctgtttttgttttatatatactatattttgtagcgccagcggccattttgtagcttcaaccgaattcggttgcatgctttttggcacaaaatgtgtttttttaaatagttctatgtcagcaactatggtttaaacttgtacgtttcctgcttgccatgcgtgccaaatccctgttttcctgacctgcactgcttgccaaccattccattgttttttacactgcactatgtgcaactactgaatcactatgtacattgtgtcatataaaataaatcactatgcgccaacgccttacataccgctgttaggcacatatttttggcttgttttaactaacctaattgcatatttggcataaggtttaaacttctaaggccaactaaatgtcaccctagttcatacatgaactgtgtaaaggttagtcatacattgttcatttgtaaaactgcacatgggtgtgtgcaaaccgttttgggttacacatttacaagcaacttatataataatactaaactacaataattcatgtataaaactaagggcgtaaccgaaatcggttgaaccgaaaccggttagtataaaagcagacattttatgcaccaaaagagaactgcaatgtttcaggacccacaggagcgacccagaaagttaccacagttatgcacagagctgcaaacaactatacatgatataatattagaatgtgtgtactgcaagcaacagttactgcgacgtgaggtatatgactttgcttttcgggatttatgcatagtatatagagatgggaatccatatgctgtatgtgataaatgtttaaagttttattctaaaattagtgagtatagacattattgttatagtgtgtatggaacaacattagaacagcaatacaacaaaccgttgtgtgatttgttaattaggtgtattaactgtcaaaagccactgtgtcctgaagaaaagcaaagacatctggacaaaaagcaaagattccataatataaggggtcggtggaccggtcgatgtatgtcttgttgcagatcatcaagaacacgtagagaaacccagctgtaatcatgcatggagatacacctacattgcatgaatatatgttagatttgcaaccagagacaactgatctctactgttatgagcaattaaatgacagctcagaggaggaggatgaaatagatggtccagctggacaagcagaaccggacagagcccattacaatattgtaaccttttgttgcaagtgtgactctacgcttcggttgtgcgtacaaagcacacacgtagacattcgtactttggaagacctgttaatgggcacactaggaattgtgtgccccatctgttctcagaaaccataatctacc

SEQ ID NO: 65 - DNA, 7906 bp, Homo sapiens
  source 1..7906: mol_type = genomic DNA; note = UNCseq2254
atggctgatcctgcaggtaccaatggggaagagggtacgggatgtaatggatggttttatgtagaggctgtagtggaaaaaaaaacaggggatgctatatcagatgacgagaacgaaaatgacagtgatacaggtgaagatttggtagattttatagtaaatgataatgattatttaacacaggcagaaacagagacagcacatgcgttgtttactgcacaggaagcaaaacaacatagagatgcagtacaggttctaaaacgaaagtatttgggtagtccacttagtgatattagtggatgtgtagacaataatattagtcctagattaaaagctatatgtatagaaaaacaaagtagagctgcaaaaaggagattatttgaaagcgaagacagcgggtatggcaatactgaagtggaaactcagcagatgttacaggtagaagggcgccatgagactgaaacaccatgtagtcagtatagtggtggaagtgggggtggttgcagtcagtacagtagtggaagtgggggagagggtgttagtgaaagacacactatatgccaaacaccacttacaaatattttaaatgtactaaaaactagtaatgcaaaggcagcaatgttagcaaaatttaaagagttatacggggtgagttttacagaattagtaagaccatttaaaagtaataaatcaacgtgttgcgattggtgtattgctgcatttggacttacacccagtatagctgacagtataaaaacactattacaacaatattgtttatatttacacattcaaagtttagcatgttcatggggaatggttgtgttactattagtaagatataaatgtggaaaaaatagagaaacaattgaaaaattgctgtctaaactattatgtgtgtctccaatgtgtatgatgatagagcctccaaaattgcgtagtacagcagcagcattatattggtataaaacaggtatatcaaatattagtgaagtgtatggagacacgccagaatggatacaaagacaaacagtattacaacatagttttaatgattgtacatttgaattatcacagatggtacaatgggcctacgataatgacatagtagacgatagtgaaattgcatataaatatgcacaattggcagacactaatagtaatgcaagtgcctttctaaaaagtaattcacaggcaaaaattgtaaaggattgtgcaacaatgtgtagacattataaacgagcagaaaaaaaacaaatgagtatgagtcaatggataaaatatagatgtgatagggtagatgatggaggtgattggaagcaaattgttatgtttttaaggtatcaaggtgtagagtttatgtcatttttaactgcattaaaaagatttttgcaaggcatacctaaaaaaaattgcatattactatatggtgcagctaacacaggtaaatcattatttggtatgagtttaatgaaatttctgcaagggtccgtaatatgttttgtaaattctaaaagccatttttggttacaaccattagcagatgccaaaataggtatgttagatgatgctacagtgccctgttggaactacatagatgacaatttaagaaatgcattggatggaaatttagtttctatggatgtaaagcatagaccattggtacaactaaaatgccctccattattaattacatctaacattaatgctggtacagattctaggtggccttatttacataatagattggtggtgtttacatttcctaatgagtttccatttgacgaaaacggaaatccagtgtatgagcttaatgataagaactggaaatcctttttctcaaggacgtggtccagattaagtttgcacgaggacgaggacaaggaaaacgatggagactctttgccaacgtttaaatgtgtgtcaggacaaaatactaacacattatgaaaatgatagtacagacctacgtgaccatatagactattggaaacacatgcgcctagaatgtgctatttattacaaggccagagaaatgggatttaaacatattaaccaccaggtggtgccaacactggctgtatcaaagaataaagcattacaagcaattgaactgcaactaacgttagaaacaatatataactcacaatatagtaatgaaaagtggacattacaagacgttagccttgaagtgtatttaactgcaccaacaggatgtataaaaaaacatggatatacagtggaagtgcagtttgatggagacatatgcaatacaatgcattatacaaactggacacatatatatatttgtgaagaagcatcagtaactgtggtagagggtcaagttgactattatggtttatattatgttcatgaaggaatacgaacatattttgtgcagtttaaagatgatgcagaaaaatatagtaaaaataaagtatgggaagttcatgcgggtggtcaggtaatattatgtcctacatctgtgtttagcagcaacgaagtatcctctcctgaaattattaggcagcacttggccaaccaccccgccgcgacccataccaaagccgtcgccttgggcaccgaagaaacacagacgactatccagcgaccaagatcagagccagacaccggaaacccctgccacaccactaagttgttgcacagagactcagtggacagtgctccaatcctcactgcatttaacagctcacacaaaggacggattaactgtaatagtaacactacacccatagtacatttaaaaggtgatgctaatactttaaaatgtttaagatatagatttaaaaagcattgtacattgtatactgcagtgtcgtctacatggcattggacaggacataatgtaaaacataaaagtgcaattgttacacttacatatgatagtgaatggcaacgtgaccaatttttgtctcaagttaaaataccaaaaactattacagtgtctactggatttatgtctatatgacaaatcttgatactgcatccacaacattactggcgtgctttttgctttgcttttgtgtgcttttgtgtgtctgcctattaatacgtccgctgcttttgtctgtgtctacatacacatcattaatactattggtattactattgtggataacagcagcctctgcgtttaggtgttttattgtatatattgtatttgtttatataccattatttttaatacatacacatgcacgctttttaattacataatgtatatgtacataatgtaattgttacatataattgttgtataccataacttactattttttcttttttattttcatatataatttttttttttgtttgtttgtttgttttttaataaactgttatcacttaacaatgcgacacaaacgttctgcaaaacgcacaaaacgtgcatcggctacccaactttataaaacatgcaaacaggcaggtacatgtccacctgacattatacctaaggttgaaggcaaaactattgctgatcaaatattacaatatggaagtatgggtgtattttttggtgggttaggaattggaacagggtcgggtacaggcggacgcactgggtatattccattgggaacaaggcctcccacagctacagatacacttgctcctgtaagaccccctttaacagtagatcctgtgggcccttctgatccttctatagtttctttagtggaagaaactagttttattgatgctggtgcaccaacatctgtaccttccattcccccagatgtatcaggatttagtattactacttcaactgataccacacctgctatattagatattaataatactgttactactgttactacacataataatcccactttcactgacccatctgtattgcagcctccaacacctgcagaaactggagggcattttacactttcatcatccactattagtacacataattatgaagaaattcctatggatacatttattgttagcacaaaccctaacacagtaactagtagcacacccataccagggtctcgcccagtggcacgcctaggattatatagtcgcacaacacaacaggttaaagttgtagaccctgcttttgtaaccactcccactaaacttattacatatgataatcctgcatatgaaggtatagatgtggataatacattatatttttctagtaatgataatagtattaatatagctccagatcctgactttttggatatagttgctttacataggccagcattaacctctaggcgtactggcataaggtacagtagaattggtaataaacaaacactacgtactcgtagtggaaaatctataggtgctaaggtacattattattatgatttaagtactattgatcctgcagaagaaatagaattacaaactataacaccttctacatatactaccacttcacatgcagcctcacctacttctattaataatggattatatgatatttatgcagatgactttattacagatacttctacaaccccggtaccatctgtaccctctacatctttatcaggttatattcctgcaaatacaacaattccttttggtggtgcatacaatattcctttagtatcaggtcctgatatacccattaatataactgaccaagctccttcattaattcctatagttccagggtctccacaatatacaattattgctgatgcaggtgacttttatttacatcctagttattacatgttacgaaaacgacgtaaacgtttaccatattttttttcagatgtctctttggctgcctagtgaggccactgtctacttgcctcctgtcccagtatctaaggttgtaagcacggatgaatatgttgcacgcacaaacatatattatcatgcaggaacatccagactacttgcagttggacatccctattttcctattaaaaaacctaacaataacaaaatattagttcctaaagtatcaggattacaatacagggtatttagaatacatttacctgaccccaataagtttggttttcctgacacctcattttataatccagatacacagcggctggtttgggcctgtgtaggtgttgaggtaggtcgtggtcagccattaggtgtgggcattagtggccatcctttattaaataaattggatgacacagaaaatgctagtgcttatgcagcaaatgcaggtgtggataatagagaatgtatatctatggattacaaacaaacacaattgtgtttaattggttgcaaaccacctataggggaacactggggcaaaggatccccatgtaccaatgttgcagtaaatccaggtgattgtccaccattagagttaataaacacagttattcaggatggtgatatggttgatactggctttggtgctatggactttactacattacaggctaacaaaagtgaagttccactggatatttgtacatctatttgcaaatatccagattatattaaaatggtgtcagaaccatatggcgacagcttatttttttatttacgaagggaacaaatgtttgttagacatttatttaatagggctggtactgttggtgaaaatgtaccagacgatttatacattaaaggctctgggtctactgcaaatttagccagttcaaattattttcctacacctagtggttctatggttacctctgatgcccaaatattcaataaaccttattggttacaacgagcacagggccacaataatggcatttgttggggtaaccaactatttgttactgttgttgatactacacgcagtacaaatatgtcattatgtgctgccatatctacttcagaaactacatataaaaatactaactttaaggagtacctacgacatggggaggaatatgatttacagtttatttttcaactgtgcaaaataaccttaactgcagacgttatgacatacatacattctatgaattccactattttggaggactggaattttggtctacaacctcccccaggaggcacactagaagatacttataggtttgtaacatcccaggcaattgcttgtcaaaaacatacacctccagcacctaaagaagatccccttaaaaaatacactttttgggaagtaaatttaaaggaaaagttttctgcagacctagatcagtttcctttaggacgcaaatttttactacaagcaggattgaaggccaaaccaaaatttacattaggaaaacgaaaagctacacccaccacctcatctacctctacaactgctaaacgcaaaaaacgtaagctgtaagtattgtatgtatgttgaattagtgttgtttgttgtgtatatgtttgtatgtgcttgtatgtgcttgtaaatattaagttgtatgtgtgtttgtatgtatggtataataaacacgtgtgtatgtgtttttaaatgcttgtgtaactattgtgtcatgcaacataaataaacttattgtttcaacacctactaattgtgttgtggttattcattgtatataaactatatttgctacatcctgtttttgttttatatatactatattttgtagcgccagcggccattttgtagcttcaaccgaattcggttgcatgctttttggcacaaaatgtgtttttttaaatagttctatgtcagcaactatggtttaaacttgtacgtttcctgcttgccatgcgtgccaaatccctgttttcctgacctgcactgcttgccaaccattccattgttttttacactgcactatgtgcaactactgaatcactatgtacattgtgtcatataaaataaatcactatgcgccaacgccttacataccgctgttaggcacatatttttggcttgttttaactaacctaattgcatatttggcataaggtttaaacttctaaggccaactaaatgtcaccctagttcatacatgaactgtgtaaaggttagtcatacattgttcatttgtaaaactgcacatgggtgtgtgcaaaccgttttgggttacacatttacaagcaacttatataataatactaaactacaataattcatgtataaaactaagggcgtaaccgaaatcggttgaaccgaaaccggttagtataaaagcagacattttatgcaccaaaagagaactgcaatgtttcaggacccacaggagcgacccagaaagttaccacagttatgcacagagctgcaaacaactatacatgatataatattagaatgtgtgtactgcaagcaacagttactgcgacgtgaggtatatgactttgcttttcgggatttatgcatagtatatagagatgggaatccatatgctgtatgtgataaatgtttaaagttttattctaaaattagtgagtatagacattattgttatagtgtgtatggaacaacattagaacagcaatacaacaaaccgttgtgtgatttgttaattaggtgtattaactgtcaaaagccactgtgtcctgaagaaaagcaaagacatctggacaaaaagcaaagattccataatataaggggtcggtggaccggtcgatgtatgtcttgttgcagatcatcaagaacacgtagagaaacccagctgtaatcatgcatggagatacacctacattgcatgaatatatgttagatttgcaaccagagacaactgatctctactgttatgagcaattaaatgacagctcagaggaggaggatgaaatagatggtccagctggacaagcagaaccggacagagcccattacaatattgtaaccttttgttgcaagtgtgactctacgcttcggttgtgcgtacaaagcacacacgtagacattcgtactttggaagacctgttaatgggcacactaggaattgtgtgccccatctgttctcagaaaccataatctacc

SEQ ID NO: 66 - DNA, 7906 bp, Homo sapiens
  source 1..7906: mol_type = genomic DNA; note = UNCseq2292
atggctgatcctgcaggtaccaatggggaagagggtacgggatgtaatggatggttttatgtagaggctgtagtggaaaaaaaaacaggggatgctatatcagatgacgagaacgaaaatgacagtgatacaggtgaagatttggtagattttatagtaaatgataatgattatttaacacaggcagaaacagagacagcacatgcgttgtttactgcacaggaagcaaaacaacatagagatgcagtacaggttctaaaacgaaagtatttgggtagtccacttagtgatattagtggatgtgtagacaataatattagtcctagattaaaagctatatgtatagaaaaacaaagtagagctgcaaaaaggagattatttgaaagcgaagacagcgggtatggcaatactgaagtggaaactcagcagatgttacaggtagaagggcgccatgagactgaaacaccatgtagtcagtatagtggtggaagtgggggtggttgcagtcagtacagtagtggaagtgggggagagggtgttagtgaaagacacactatatgccaaacaccacttacaaatattttaaatgtactaaaaactagtaatgcaaaggcagcaatgttagcaaaatttaaagagttatacggggtgagttttacagaattagtaagaccatttaaaagtaataaatcaacgtgttgcgattggtgtattgctgcatttggacttacacccagtatagctgacagtataaaaacactattacaacaatattgtttatatttacacattcaaagtttagcatgttcatggggaatggttgtgttactattagtaagatataaatgtggaaaaaatagagaaacaattgaaaaattgctgtctaaactattatgtgtgtctccaatgtgtatgatgatagagcctccaaaattgcgtagtacagcagcagcattatattggtataaaacaggtatatcaaatattagtgaagtgtatggagacacgccagaatggatacaaagacaaacagtattacaacatagttttaatgattgtacatttgaattatcacagatggtacaatgggcctacgataatgacatagtagacgatagtgaaattgcatataaatatgcacaattggcagacactaatagtaatgcaagtgcctttctaaaaagtaattcacaggcaaaaattgtaaaggattgtgcaacaatgtgtagacattataaacgagcagaaaaaaaacaaatgagtatgagtcaatggataaaatatagatgtgatagggtagatgatggaggtgattggaagcaaattgttatgtttttaaggtatcaaggtgtagagtttatgtcatttttaactgcattaaaaagatttttgcaaggcatacctaaaaaaaattgcatattactatatggtgcagctaacacaggtaaatcattatttggtatgagtttaatgaaatttctgcaagggtctgtaatatgttttgtaaattctaaaagccatttttggttacaaccattagcagatgccaaaataggtatgttagatgatgctacagtgccctgttggaactacatagatgacaatttaagaaatgcattggatggaaatttagtttctatggatgtaaagcatagaccattggtacaactaaaatgccctccattattaattacatctaacattaatgctggtacagattctaggtggccttatttacataatagattggtggtgtttacatttcctaatgagtttccatttgacgaaaacggaaatccagtgtatgagcttaatgataagaactggaaatcctttttctcaaggacgtggtccagattaagtttgcacgaggacgaggacaaggaaaacgatggagactctttgccaacgtttaaatgtgtgtcaggacaaaatactaacacattatgaaaatgatagtacagacctacgtgaccatatagactattggaaacacatgcgcctagaatgtgctatttattacaaggccagagaaatgggatttaaacatattaaccaccaggtggtgccaacactggctgtatcaaagaataaagcattacaagcaattgaactgcaactaacgttagaaacaatatataactcacaatatagtaatgaaaagtggacattacaagacgttagccttgaagtgtatttaactgcaccaacaggatgtataaaaaaacatggatatacagtggaagtgcagttcgatggagacatatgcaatacaatgcattatacaaactggacacatatatatatttgtgaagaagcatcagtaactgtggtagagggtcaagttgactattatggtttatattatgttcatgaaggaatacgaacatattttgtgcagtttaaagatgatgcagaaaaatatagtaaaaataaagtatgggaagttcatgcgggtggtcaggtaatattatgtcctacatctgtgtttagcagcaacgaagtatcctctcctgaaactattaggcagcacttggccaaccactccgccgcgacccataccaaagccgtcgccttgggcaccgaagaaacacagacgactatccagcgaccaagatcagagccagacaccggaaacccctgccacaccactaagttgttgcacagagactcagtggacagtgctccaatcctcactgcatttaacagctcacacaaaggacggattaactgtaatagtaacactacacccatagtacatttaaaaggtgatgctaatactttaaaatgtttaagatatagatttaaaaagcattgtacattgtatactgcagtgtcgtctacatggcattggacaggacataatgtaaaacataaaagtgcaattgttacacttacatatgatagtgaatggcaacgtgaccaatttttgtctcaagttaaaataccaaaaactattacagtgtctactggatttatgtctatatgacaaatcttgatactgcatccacaacattactggcgtgctttttgctttgcttttgtgtgcttttgtgtgtctgcctattaatacgtccgctgcttttgtctgtgtctacatacacatcattaatactattggtattactattgtggataacagcagcctctgcgtttaggtgttttattgtatatattgtatttgtttatataccattatttttaatacatacacatgcacgctttttaattacataatgtatatgtacataatgtaattgttacatataattgttgtataccataacttactattttttcttttttatttttatatataatttttttttttgtttgtttgtttgttttttaataaactgttatcacttaacaatgcgacacaaacgttctgcaaaacgcacaaaacgtgcatcggctacccaactttataaaacatgcaaacaggcaggtacatgtccacctgacattatacctaaggttgaaggcaaaactattgctgatcaaatattacaatatggaagtatgggtgtattttttggtgggttaggaattggaacagggtcgggtacaggcggacgcactgggtatattccattgggaacaaggcctcccacagctacagatacacttgctcctgtaagaccccctttaacagtagatcctgtgggcccttctgatccttctatagtttctttagtggaagaaactagttttattgatgctggtgcaccaacatctgtaccttccattcccccagatgtatcaggatttagtattactacttcaactgataccacacctgctatattagatattaataatactgttactactgttactacacataataatcccactttcactgacccatctgtattgcagcctccaacacctgcagaaactggagggcattttacactttcatcatccactattagtacacataattatgaagaaattcctatggatacatttattgttagcacaaaccctaacacagtaactagtagcacacccataccagggtctcgcccagtggcacgcctaggattatatagtcgcacaacacaacaggttaaagttgtagaccctgcttttgtaaccactcccactaaacttattacatatgataatcctgcatatgaaggtatagatgtggataatacattatattttcctagtaatgataatagtattaatatagctccagatcctgactttttggatatagttgctttacataggccagcattaacctctaggcgtactggcattaggtacagtagaattggtaataaacaaacactacgtactcgtagtggaaaatctataggtgctaaggtacattattattatgatttcagtactattgatcctgcagaagaaatagaattacaaactataacaccttctacatatactaccacttcacatgcagcctcacctacttctattaataatggattatatgatatttatgcagatgactttattacagatacttctacaaccccggtaccatctgtaccctctacatctttatcaggttatattcctgcaaatacaacaattccttttggtggtgcatacaatattcctttagtatcaggtcctgatatacccattaatataactgaccaagctccttcattaattcctatagttccagggtctccacaatatacaattattgctgatgcaggtgacttttatttacatcctagttattacatgttacgaaaacgacgtaaacgtttaccatattttttttcagatgtctctttggctgcctagtgaggccactgtctacttgcctcctgtcccagtatctaaggttgtaagcacggatgaatatgttgcacgcacaaacatatattatcatgcaggaacatccagactacttgcagttggacatccctattttcctattaaaaaacctaacaataacaaaatattagttcctaaagtatcaggattacaatacagggtatttagaatacatttacctgaccccaataagtttggttttcctgacacctcattttataatccagatacacagcggctggtttgggcctgtgtaggtgttgaggtaggtcgtggtcagccattaggtgtgggcattagtggccatcctttattaaataaattggatgacacagaaaatgctagtgcttatgcagcaaatgcaggtgtggataatagagaatgtatatctatggattacaaacaaacacaattgtgtttaattggttgcaaaccacctataggggaacactggggcaaaggatccccatgtaccaatgttgcagtaaatccaggtgattgtccaccattagagttaataaacacagttattcaggatggtgatatggttgatactggctttggtgctatggactttactacattacaggctaacaaaagtgaagttccactggatatttgtacatctatttgcaaatatccagattatattaaaatggtgtcagaaccatatggcgacagcttatttttttatttacgaagggaacaaatgtttgttagacatttatttaatagggctggtgctgttggtgaaaatgtaccagacgatttatacattaaaggctctgggtctactgcaaatttagccagttcaaattattttcctacacctagtggttctatggttacctctgatgcccaaatattcaataaaccttattggttacaacgagcacagggccacaataatggcatttgttggggtaaccaactatttgttactgttgttgatactacacgcagtacaaatatgtcattatgtgctgccatatctacttcagaaactacatataaaaatactaactttaaggagtacctacgacatggggaggaatatgatttacagtttatttttcaactgtgcaaaataaccttaactgcagacgttatgacatacatacattctatgaattccactattttggaggactggaattttggtctacaacctcccccaggaggcacactagaagatacttataggtttgtaacatcccaggcaattgcttgtcaaaaacatacacctccagcacctaaagaagatccccttaaaaaatacactttttgggaagtaaatttaaaggaaaagttttctgcagacctagatcagtttcctttaggacgcaaatttttactacaagcaggattgaaggccaaaccaaaatttacattaggaaaacgaaaagctacacccaccacctcatctacctctacaactgctaaacgcaaaaaacgtaagctgtaagtattgtatgtatgttgaattagtgttgtttgttgtttatatgtttgtatgtgcttgtatgtgcttgtaaatattaagttgtatgtgtgtttgtatgtatggtataataaacacgtgtgtatgtgtttttaaatgcttgtgtaactattgtgtcatgcaacataaataaacttattgtttcaacacctactaattgtgttgtggttattcattgtatataaactatatttgctacatcctgtttttgttttatatatactatattttgtagcgccagcggccattttgtagcttcaaccgaattcggttgcatgctttttggcacaaaatgtgttttttcaaatagttctatgtcagcaactatagtttaaacttgtacgtttcctgcttgccatgcgtgccaaatccctgttttcctgacctgcactgcttgccaaccattccattgttttttacactgcactatgtgcaactactgaatcactatgtacattgtgtcatataaaataaatcactatgcgccaacgccttacataccgctgttaggcacatatttttggcttgttttaactaacctaattgcatatttggcataaggtttaaacttctaaggccaactaaatgtcaccctagttcatacatgaactgtgtaaaggttagtcatacattgttcatttgtaaaactgcacatgggtgtgtgcaaaccgttttgggttacacatttacaagcaacttatataataatactaaactacaataattcatgtataaaactaagggcgtaaccgaaatcggttgaaccgaaaccggttagtataaaagcagacattttatgcaccaaaagagaactgcaatgtttcaggacccacaggagcgacccagaaagttaccacagttatgcacagagctgcaaacaactatacatgatataatattagaatgtgtgtactgcaagcaacagttactgcgacgtgaggtatatgactttgcttttcgggatttatgcatagtatatagagatgggaatccatatgctgtatgtgataaatgtttaaagttttattctaaaattagtgagtatagacattattgttatagtttgtatggaacaacattagaacagcaatacaacaaaccgttgtgtgatttgttaattaggtgtattaactgtcaaaagccactgtgtcctgaagaaaagcaaagacatctggacaaaaagcaaagattccataatataaggggtcggtggaccggtcgatgtatgtcttgttgcagatcatcaagaacacgtagagaaacccagctgtaatcatgcatggagatacacctacattgcatgaatatatgttagatttgcaaccagagacaactgatctctactgttatgagcaattaaatgacagctcagaggaggaggatgaaatagatggtccagctggacaagcagaaccggacagagcccattacaatattgtaaccttttgttgcaagtgtgactctacgcttcggttgtgcgtacaaagcacacacgtagacattcgtactttggaagacctgttaatgggcacactgggaattgtgtgccccatctgttctcagaaaccataatctacc

SEQ ID NO: 67 - DNA, 7906 bp, Homo sapiens
  source 1..7906: mol_type = genomic DNA; note = UNCseq2298
atggctgatcctgcaggtaccaatggggaagagggtacgggatgtaatggatggttttatgtagaggctgtagtggaaaaaaaaacaggggatgctatatcagatgacgagaacgaaaatgacagtgatacaggtgaagatttggtagattttatagtaaatgataatgattatttaacacaggcagaaacagagacagcacatgcgttgtttactgcacaggaagcaaaacaacatagagatgcagtacaggttctaaaacgaaagtatttgggtagtccacttagtgatattagtggatgtgtagacaataatattagtcctagattaaaagctatatgtatagaaaaacaaagtagagctgcaaaaaggagattatttgaaagcgaagacagcgggtatggcaatactgaagtggaaactcagcagatgttacaggtagaagggcgccatgagactgaaacaccatgtagtcagtatagtggtggaagtgggggtggttgcagtcagtacagtagtggaagtgggggagagggtgttagtgaaagacacactatatgccaaacaccacttacaaatattttaaatgtactaaaaactagtaatgcaaaggcagcaatgttagcaaaatttaaagagttatacggggtgagtttttcagaattagtaagaccatttaaaagtaataaatcaacgtgttgcgattggtgtattgctgcatttggacttacacccagtatagctgacagtataaaaacactattacaacaatattgtttatatttacacattcaaagtttagcatgttcatggggaatggttgtgttactattagtaagatataaatgtggaaaaaatagagaaacaattgaaaaattgctgtctaaactattatgtgtgtctccaatgtgtatgatgatagagcctccaaaattgcgtagtacagcagcagcattatattggtataaaacaggtatatcaaatattagtgaagtgtatggagacacgccagaatggatacaaagacaaacagtattacaacatagttttaatgattgtacatttgaattatcacagatggtacaatgggcctacgataatgacatagtagacgatagtgaaattgcatataaatatgcacaattggcagacactaatagtaatgcaagtgcctttctaaaaagtaattcacaggcaaaaattgtaaaggattgtgcaacaatgtgtagacattataaacgagcagaaaaaaaacaaatgagtatgagtcaatggataaaatatagatgtgatagggtagatgatggaggtgattggaagcaaattgttatgtttttaaggtatcaaggtgtagagtttatgtcatttttaactgcattaaaaagatttttgcaaggcatacctaaaaaaaattgcatattactatatggtgcagctaacacaggtaaatcattatttggtatgagtttaatgaaatttctgcaagggtctgtaatatgttttgtaaattctaaaagccatttttggttacaaccattagcagatgccaaaataggtatgttagatgatgctacagtgccctgttggaactacatagatgacaatttaagaaatgcattggatggaaatttagtttctatggatgtaaagcatagaccattggtacaactaaaatgccctccattattaattacatctaacattaatgctggtacagattctaggtggccttatttacataatagattggtggtgtttacatttcctaatgagtttccatttgacgaaaacggaaatccagtgtatgagcttaatgataagaactggaaatcctttttctcaaggacgtggtccagattaagtttgcacgaggacgaggacaaggaaaacgatggagactctttgccaacgtttaaatgtgtgtcaggacaaaatactaacacattatgaaaatgatagtacagacctacgtgaccatatagactattggaaacacatgcgcctagaatgtgctatttattacaaggccagagaaatgggatttaaacatattaaccaccaggtggtgccaacactggctgtatcaaagaataaagcattacaagcaattgaactgcaactaacgttagaaacaatatataactcacaatatagtaatgaaaagtggacattacaagacgttagccttgaagtgtatttaactgcaccaacaggatgtataaaaaaacatggatatacagtggaagtgcagtttgatggagacatatgcaatacaatgcattatacaaactggacacatatatatatttgtgaagaagcatcagtaactgtggtagagggtcaagttgactattatggtttatattatgttcatgaaggaatacgaacatattttgtgcagtttaaagatgatgcagaaaaatatagtaaaaataaagtatgggaagttcatgcgggtggtcaggtaatattatgtcctacatctgtgtttagcagcaacgaagtatcctctcctgaaattattaggcagcacttggccaaccaccccgccgcgacccataccaaagccgtcgccttgggcaccaaagaaacacagacgactatccagcgaccaagatcagagccagacaccggaaacccctgccacaccactaagttgttgcacagagactcagtggacagtgctccaatcctcactgcatttaacagctcacacaaaggacggattaactgtaatagtaacactacacccatagtacatttaaaaggtgatgctaatactttaaaatgtttaagatatagatttaaaaagcattgtacattgtatactgcagtgtcgtctacatggcattggacaggacataatgtaaaacataaaagtgcaattgttacacttacatatgatagtgaatggcaacgtgaccaatttttgtctcaagttaaaataccaaaaactattacagtgtctactggatttatgtctatatgacaaatcttgatactgcatccacaacattactggcgtgctttttgctttgcttttgtgtgcttttgtgtgtctgcctattaatacgtccgctgcttttgtctgtgtctacatacacatcattaataatattggtattactattgtggataacagcagcctctgcgtttaggtgttttattgtatatattatatttgtttatataccattatttttaatacatacacatgcacgctttttaattacataatgtatatgtacataatgtaattgttacatataattgttgtataccataacttactattttttcttttttattttcatatataatttttttttttgtttgtttgtttgttttttaataaactgttattacttaacaatgcgacacaaacgttctgcaaaacgcacaaaacgtgcatcggctacccaactttataaaacatgcaaacaggcaggtacatgtccacctgacattatacctaaggttgaaggcaaaactattgctgatcaaatattacaatatggaagtatgggtgtattttttggtgggttaggaattggaacagggtcgggtacaggcggacgcactgggtatattccattgggaacaaggcctcccacagctacagatacacttgctcctgtaagaccccctttaacagtagatcctgtgggcccttctgatccttctatagtttctttagtggaagaaactagttttattgatgctggtgcaccaacatctgtaccttccattcccccagatgtatcaggatttagtattactacttcaactgataccacacctgctatattagatattaataatactgttactactgttactacacataataatcccactttcactgacccatctgtattgcagcctccaacacctgcagaaactggagggcattttacactttcatcatccactattagtacacataattatgaagaaattcctatggatacatttattgttagcacaaaccctaacacagtaactagtagcacacccataccagggtctcgcccagtggcacgcctaggattatatagtcgcacaacacaacaggttaaagttgtagaccctgcttttgtaaccactcccactaaacttattacatatgataatcctgcatatgaaggtatagatgtggataatacattatatttttctagtaatgataatagtattaatatagctccagatcctgactttttggatatagttgctttacataggccagcattaacctctaggcgtactggcattaggtacagtagaattggtaataaacaaacactacgtactcgtagtggaaaatctataggtgctaaggtacattattattatgatttcagtactattgatcctgcagaagaaatagaattacaaactataacaccttctacatatactaccacttcacatgcagcctcacctacttctattaataatggattatatgatatttatgcagatgactttattacagatacttctacaaccccggtaccatctgtaccctctacatctttatcaggttatattcctgcaaatacaacaattccttttggtggtgcatacaatattcctttagtatctggtcctgatatacccattaatataactgaccaagctccttcattaattcctatagttccagggtctccacaatatacaattattgctgatgcaggtgacttttatttacatcctagttattacatgttacgaaaacgacgtaaacgtttaccatattttttttcagatgtctctttggctgcctagtgaggccactgtctacttgcctcctgtcccagtatctaaggttgtaagcacggatgaatatgttgcacgcacaaacatatattatcatgcaggaacatccagactacttgcagttggacatccctattttcctattaaaaaacctaacaataacaaaatattagttcctaaagtatcaggattacaatacagggtatttagaatacatttacctgaccccaataagtttggttttcctgacacctcattttataatccagatacacagcggctggtttgggcctgtgtaggtgttgaggtaggtcgtggtcagccattaggtgtgggcattagtggccatcctttattaaataaattggatgacacagaaaatgctagtgcttatgcagcaaatgcaggtgtggataatagagaatgtatatctatggattacaaacaaacacaattgtgtttaattggttgcaaaccacctataggggaacactggggcaaaggatccccatgtaccaatgttgcagtaaatccaggtgattgtccaccattagagttaataaacacagttattcaggatggtgatatggttgatactggctttggtgctatggactttactacattacaggctaacaaaagtgaagttccactggatatttgtacatctatttgcaaatatccagattatattaaaatggtgtcagaaccatatggcgacagcttatttttttatttacgaagggaacaaatgtttgttagacatttatttaatagggctggtactgttggtgaaaatgtaccagacgatttatacattaaaggctctgggtctactgcaaatttagccagttcaaattattttcctacacctagtggttctatggttacctctgatgcccaaatattcaataaaccttattggttacaacgagcacagggccacaataatggcatttgttggggtaaccaactatttgttactgttgttgatactacacgcagtacaaatatgtcattatgtgctgccatatctacttcagaaactacatataaaaatactaactttaaggagtacctacgacatggggaggaatatgatttacagtttatttttcaactgtgcaaaataaccttaactgcagacgttatgacatacatacattctatgaattccactattttggaggactggaattttggtctacaacctcccccaggaggcacactagaagatacttataggtttgtaacatcccaggcaattgcttgtcaaaaacatacacctccagcacctaaagaagatccccttaaaaaatacactttttgggaagtaaatttaaaggaaaagttttctgcagacctagatcagtttcctttaggacgcaaatttttactacaagcaggattgaaggccaaaccaaaatttacattaggaaaacgaaaagctacacccaccacctcatctacctctacaactgctaaacgcaaaaaacgtaagctgtaagtattgtatgtatgttgcattagtgttgtttgttgtgtatatgtttgtatgtgcttgtatgtgcttgtaaatattaagttgtatgtgtgtttgtatgtatggtataataaacacgtgtgtatgtgtttttaaatgcttgtgtaactattgtgtcatgcaacataaataaacttattgtttcaacacctactaattgtgttgtggttattcattgtatataaactatatttgctacatcctgtttttgttttatatatactatattttgtagcgccagcggccattttgtagcttcaaccgaattcggttgcatgctttttggcacaaaatgtgtttttttaaatagttctatgtcagcaactatggtttaaacttgtacgtttcctgcttgccatgcgtgccaaatccctgttttcctgacctgcactgcttgccaaccattccattgttttttacactgcactatgtgcaactactgaatcactatgtacattgtgtcatataaaataaatcactatgcgccaacgccttacataccgctgttaggcacatatttttggcttgttttaactaacctaattgcatatttggcataaggtttaaacttctaaggccaactaaatgtcaccctagttcatacatgaactgtgtaaaggttagtcatacattgttcatttgtaaaactgcacatgggtgtgtgcaaaccgttttgggttacacatttacaagcaacttatataataatactaaactacaataattcatgtataaaactaagggcgtaaccgaaatcggttgaaccgaaaccggttagtataaaagcagacattttatgcaccaaaagagaactgcaatgtttcaggacccacaggagcgacccagaaagttaccacagttatgcacagagctgcaaacaactatacatgatataatattagaatgtgtgtactgcaagcaacagttactgcgacgtgaggtatatgactttgcttttcgggatttatgcatagtatatagagatgggaatccatatgctgtatgtgataaatgtttaaagttttattctaaaattagtgagtatagacattattgttatagtttgtatggaacaacattagaacagcaatacaacaaaccgttgtgtgatttgttaattaggtgtattaactgtcaaaagccactgtgtcctgaagaaaagcaaagacatctggacaaaaagcaaagattccataatataaggggtcggtggaccggtcgatgtatgtcttgttgcagatcatcaagaacacgtagagaaacccagctgtaatcatgcatggagatacacctacattgcatgaatatatgttagatttgcaaccagagacaactgatctctactgttatgagcaattaaatgacagctcagaggaggaggatgaaatagatggtccagctggacaagcagaaccggacagagcccattacaatattgtaaccttttgttgcaagtgtgactctacgcttcggttgtgcgtacaaagcacacacgtagacattcgtactttggaagacctgttaatgggcacactaggaattgtgtgccccatctgttctcagaaaccataatctacc

SEQ ID NO: 68 - DNA, 7906 bp, Homo sapiens
  source 1..7906: mol_type = genomic DNA; note = UNCseq2333
atggctgatcctgcaggtaccaatggggaagagggtacgggatgtaatggatggttttatgtagaggctgtagtggaaaaaaaaacaggggatgctatatcagatgacgagaacgaaaatgacagtgatacaggtgaagatttggtagattttatagtaaatgataatgattatttaacacaggcagaaacagagacagcacatgcgttgtttactgcacaggaagcaaaacaacatagagatgcagtacaggttctaaaacgaaagtatttgggtagtccacttagtgatattagtggatgtgtagacaataatattagtcctagattaaaagctatatgtatagaaaaacaaagtagagctgcaaaaaggagattatttgaaagcgaagacagcgggtatggcaatactgaagtggaaactcagcagatgttacaggtagaagggcgccatgagactgaaacaccatgtagtcagtatagtggtggaagtgggggtagttgcagtcagtacagtagtggaagtgggggagagggtgttagtgaaagacacactatatgccaaacaccacttacaaatattttaaatgtactaaaaactagtaatgcaaaggcagcaatgttagcaaaatttaaagagttatacggggtgagtttttcagaattagtaagaccatttaaaagtaataaatcaacgtgttgcgattggtgtattgctgcatttggacttacacccagtatagctgacagtataaaaacactattacaacaatattgtttatatttacacattcaaagtttagcatgttcatggggaatggttgtgttactattagtaagatataaatgtggaaaaaatagagaaacaattgaaaaattgctgtctaaactattatgtgtgtctccaatgtgtatgatgatagagcctccaaaattgcgtagtacagcagcagcattatattggtataaaacaggtatatcaaatattagtgaagtgtatggagacacgccagaatggatacaaagacaaacagtattacaacatagttttaatgattgtacatttgaattatcacagatggtacaatgggcctacgataatgacatagtagacgatagtgaaattgcatataaatatgcacaattggcagacactaatagtaatgcaagtgcctttctaaaaagtaattcacaggcaaaaattgtaaaggattgtgcaacaatgtgtagacattataaacgagcagaaaaaaaacaaatgagtatgagtcaatggataaaatatagatgtgatagggtagatgatggaggtgattggaagcaaattgttatgtttttaaggtatcaaggtgtagagtttatgtcatttttaactgcattaaaaagatttttgcaaggcatacctaaaaaaaattgcatattactatatggtgcagctaacacaggtaaatcattatttggtatgagtttaatgaaatttctgcaagggtctgtaatatgttttgtaaattctaaaagccatttttggttacaaccattagcagatgccaaaataggtatgttagatgatgctacagtgccctgttggaactacatagatgacaatttaagaaatgcattggatggaaatttagtttctatggatgtaaagcatagaccattggtacaactaaaatgccctccattattaattacatctaacattaatgctggtacagattctaggtggccttatttacataatagattggtggtgtttacatttcctaatgagtttccatttgacgaaaacggaaatccagtgtatgagcttaatgataagaactggaaatcctttttctcaaggacgtggtccagattaagtttgcacgaggacgaggacaaggaaaacgatggagactctttgccaacgtttaaatgtgtgtcaggacaaaatactaacacattatgaaaatgatagtacagacctacgtgaccatatagactattggaaacacatgcgcctagaatgtgctatttattacaaggccagagaaatgggatttaaacatattaaccaccaggtggtgccaacactggctgtatcaaagaataaagcattacaagcaattgaactgcaactaacgttagaaacaatatataactcacaatatagtaatgaaaagtggacattacaagacgttagccttgaagtgtatttaactgcaccaacaggatgtataaaaaaacatggatatacagtggaagtgcagtttgatggagacatatgcaatacaatgcattatacaaactggacacatatatatatttgtgaagaagcatcagtaactgtggtagagggtcaagttgactattatggtttatattatgttcatgaaggaatacgaacatattttgtgcagtttaaagatgatgcagaaaaatatagtaaaaataaagtatgggaagttcatgcgggtggtcaggtaatattatgtcctacatctgtgtttagcagcaacgaagtatcctctcctgaaattattaggcagcacttggccaaccaccccgccgcgacccataccaaagccgtcgccttgggcaccgaagaaacacagacgactatccagcgaccaagatcagagccagacaccggaaacccctgccacaccactaagttgttgcacagagactcagtggacagtgctccaatcctcactgcatttaacagctcacacaaaggacggattaactgtaatagtaacactacacccatagtacatttaaaaggtgatgctaatactttaaaatgtttaagatatagatttaaaaagcattgtacattgtatactgcagtgtcgtctacatggcattggacaggacataatgtaaaacataaaagtgcaattgttacacttacatatgatagtgaatggcaacgtgaccaatttttgtctcaagttaaaataccaaaaactattacagtgtctactggatttatgtctatatgacaaatcttgatactgcatccacaacattactggcgtgctttttgctttgcttttgtgtgcttttgtgtgtctgcctattaatacgtccgctgcttttgtctgtgtctacatacacatcattaataatattggtattactattgtggataacagcagcctctgcgtttaggtgttttattgtatatattatatttgtttatataccattatttttaatacatacacatgcacgctttttaattacataatgtatatgtacataatgtaattgttacatataattgttgtataccataacttactattttttcttttttattttcatatataatttttttttttgtttgtttgtttgttttttaataaactgttatcacttaacaatgcgacacaaacgttctgcaaaacgcacaaaacgtgcatcggctacccaactttataaaacatgcaaacaggcaggtacatgtccacctgacattatacctaaggttgaaggcaaaactattgctgatcaaatattacaatatggaagtatgggtgtattttttggtgggttgggaattggaacagggtcgggtacaggcggacgcactgggtatattccattgggaacaaggcctcccacagctacagatacacttgctcctgtaagaccccctttaacagtagatcctgtgggcccttctgatccttctatagtttctttagtggaagaaactagttttattgatgctggtgcaccaacatctgtaccttccattcccccagatgtatcaggatttagtattactacttcaactgataccacacctgctatattagatattaataatactgttactactgttactacacataataatcccactttcactgacccatctgtattgcagcctccaacacctgcagaaactggagggcattttacactttcatcatccactattagtacacataattatgaagaaattcctatggatacatttattgttagcacaaaccctaacacagtaactagtagcacacccataccagggtctcgcccagtggcacgcctaggattatatagtcgcacaacacaacaagttaaagttgtagaccctgcttttgtaaccactcccactaaacttattacatatgataatcctgcatatgaaggtatagatgtggataatacattatatttttctagtaatgataatagtattaatatagctccagatcctgactttttggatatagttgctttacataggccagcattaacctctaggcgtactggcattaggtacagtagaattggtaataaacaaacactacgtactcgtagtggaaaatctataggtgctaaggtacattattattatgatttcagtactattgatcctgcagaagaaatagaattacaaactataacaccttctacatatactaccacttcacatgcagcctcacctacttctattaataatggattatatgatatttatgcagatgactttattacagatacttctacaaccccggtaccatctgtaccctctacatctttatcaggttatattcctgcaaatacaacaattccttttggtggtgcatacaatattcctttagtatcaggtcctgatatacccattaatataactgaccaagctccttcattaattcctatagttccagggtctccacaatatacaattattgctgatgcaggtgacttttatttacatcctagttattacatgttacgaaaacgacgtaaacgtttgccatattttttttcagatgtctctttggctgcctagtgaggccactgtctacttgcctcctgtcccagtatctaaggttgtaagcacggatgaatatgttgcacgcacaaacatatattatcatgcaggaacatccagactacttgcagttggacatccctattttcctattaaaaaacctaacaataacaaaatattagttcctaaagtatcaggattacaatacagggtatttagaatacatttacctgaccccaataagtttggttttcctgacacctcattttataatccagatacacagcggctggtttgggcctgtgtaggtgttgaggtaggtcgtggtcagccattaggtgtgggcattagtggccatcctttattaaataaattggatgacacagaaaatgctagtgcttatgcagcaaatgcaggtgtggataatagagaatgtatatctatggattacaaacaaacacaattgtgtttaattggttgcaaaccacctataggggaacactggggcaaaggatccccatgtaccaatgttgcagtaaatccaggtgattgtccaccattagagttaataaacacagttattcaggatggtgatatggttgatactggctttggtgctatggactttactacattacaggctaacaaaagtgaagttccactggatatttgtacatctatttgcaaatatccagattatattaaaatggtgtcagaaccatatggcgacagcttatttttttatttacgaagggaacaaatgtttgttagacatttatttaatagggctggtactgttggtgaaaatgtaccagacgatttatacattaaaggctctgggtctactgcaaatttagccagttcaaattattttcctacacctagtggttctatggttacctctgatgcccaaatattcaataaaccttattggttacaacgagcacagggccacaataatggcatttgttggggtaaccaactatttgttactgttgttgatactacacgcagtacaaatatgtcattatgtgctgccatatctacttcagaaactacatataaaaatactaactttaaggagtacctacgacatggggaggaatatgatttacagtttatttttcaactgtgcaaaataaccttaactgcagacgttatgacatacatacattctatgaattccactattttggaggactggaattttggtctacaacctcccccaggaggcacactagaagatacttataggtttgtaacatcccaggcaattgcttgtcaaaaacatacacctccagcacctaaagaagatccccttaaaaaatacactttttgggaagtaaatttaaaggaaaagttttctgcagacctagatcagtttcctttaggacgcaaatttttactacaagcaggattgaaggccaaaccaaaatttacattaggaaaacgaaaagctacacccaccacctcatctacctctacaactgctaaacgcaaaaaacgtaagctgtaagtattgtatgtatgttgaattagtgttgtttgttgtgtatatgtttgtatgtgcttgtatgtgcttgtaaatattaagttgtatgtgtgtttgtatgtatggtataataaacacgtgtgtatgtgtttttaaatgcttgtgtaactattgtgtcatgcaacataaataaacttattgtttcaacacctactaattgtgttgtggttattcattgtatataaactatatttgctacatcctgtttttgttttatatatactatattttgtagcaccagcggccattttgtagcttcaaccgaattcggttgcatgctttttggcacaaaatgtgtttttttaaatagttctatgtcagcaactatggtttaaacttgtacgtttcctgcttgccatgcgtgccaaatccctgttttcctgacctgcactgcttgccaaccattccattgttttttacactgcactatgtgcaactactgaatcactatgtacattgtgtcatataaaataaatcactatgcgccaacgccttacataccgctgttaggcacatatttttggcttgttttaactaacctaattgcatatttggcataaggtttaaacttctaaggccaactaaatgtcaccctagttcatacatgaactgtgtaaaggttagtcatacattgttcatttgtaaaactgcacatgggtgtgtgcaaaccgttttgggttacacatttacaagcaacttatataataatactaaactacaataattcatgtataaaactaagggcgtaaccgaaatcggttgaaccgaaaccggttagtataaaagcagacattttatgcaccaaaagagaactgcaatgtttcaggacccacaggagcgacccagaaagttaccacagttatgcacagagctgcaaacaactatacatgatataatattggaatgtgtgtactgcaagcaacagttactgcgacgtgaggtatatgactttgcttttcgggatttatgcatagtatatagagatgggaatccatatgctgtatgtgataaatgtttaaagttttattctaaaattagtgagtatagacattattgttatagtttgtatggaacaacattagaacagcaatacaacaaaccgttgtgtgatttgttaattaggtgtattaactgtcaaaagccactgtgtcctgaagaaaagcaaagacatctggacaaaaagcaaagattccataatataaggggtcggtggaccggtcgatgtatgtcttgttgcagatcatcaagaacacgtagagaaacccagctgtaatcatgcatggagatacacctacattgcatgaatatatgttagatttgcaaccagagacaactgatctctactgttatgagcaattaaatgacagctcagaggaggaggatgaaatagatggtccagctggacaagcagaaccggacagagcccattacaatattgtaaccttttgttgcaagtgtgactctacgcttcggttgtgcgtacaaagcacacacgtagacattcgtactttggaagacctgttaatgggcacactaggaattgtgtgccccatctgttctcagaaaccataatctacc

SEQ ID NO: 69 - DNA, 7906 bp, Homo sapiens
  source 1..7906: mol_type = genomic DNA; note = UNCseq2337
atggctgatcctgcaggtaccaatggggaagagggtacgggatgtaatggatggttttatgtagaggctgtagtggaaaaaaaaacaggggatgctatatcagatgacgagaacgaaaatgacagtgatacaggtgaagatttggtagattttatagtaaatgataatgattatttaacacaggcagaaacagagacagcacatgcgttgtttactgcacaggaagcaaaacaacatagagatgcagtacaggttctaaaacgaaagtatttgggtagtccacttagtgatattagtggatgtgtagacaataatattagtcctagattaaaagctatatgtatagaaaaacaaagtagagctgcaaaaaggagattatttgaaagcgaagacagcgggtatggcaatactgaagtggaaactcagcagatgttacaggtagaagggcgccatgagactgaaacaccatgtagtcagtatagtggtggaagtgggggtggttgcagtcagtacagtagtggaagtgggggagagggtgttagtgaaagacacactatatgccaaacaccacttacaaatattttaaatgtactaaaaactagtaatgcaaaggcagcaatgttagcaaaatttaaagagttatacggggtgagtttttcagaattagtaagaccatttaaaagtaataaatcaacgtgttgcgattggtgtattgctgcattcggacttacacccagtatagctgacagtataaaaacactattacaacaatattgtttatatttacacattcaaagtttagcatgttcatggggaatggttgtgttactattagtaagatataaatgtggaaaaaatagagaaacaattgaaaaattgctgtctaaactattatgtgtgtctccaatgtgtatgatgatagagcctccaaaattgcgtagtacagcagcagcattatattggtataaaacaggtatatcaaatattagtgaagtgtatggagacacgccagaatggatacaaagacaaacagtattacaacatagttttaatgattgtacatttgaattatcacagatggtacaatgggcctacgataatgacatagtagacgatagtgaaattgcatataaatatgcacaattggcagacactaatagtaatgcaagtgcctttctaaaaagtaattcacaggcaaaaattgtaaaggattgtgcaacaatgtgtagacattataaacgagcagaaaaaaaacaaatgagtatgagtcaatggataaaatatagatgtgatagggtagatgatggaggtgattggaagcaaattgttatgtttttaaggtatcaaggtgtagagtttatgtcatttttaactgcattaaaaagatttttgcaaggcatacctaaaaaaaattgcatattactatatggtgcagctaacacaggtaaatcattatttggtatgagtttaatgaaatttctgcaagggtctgtaatatgttttgtaaattctaaaagccatttttggttacaaccattagcagatgccaaaataggtatgttagatgatgctacagtgccctgttggaactacatagatgacaatttaagaaatgcattggatggaaatttagtttctatggatgtaaagcatagaccattggtacaactaaaatgccctccattattaattacatctaacattaatgctggtacagattctaggtggccttatttacataatagattggtggtgtttacatttcctaatgagtttccatttgacgaaaacggaaatccagtgtatgagcttaatgataagaactggaaatcctttttctcaaggacgtggtccagattaagtttgcacgaggacgaggacaaggaaaacgatggagactctttgccaacgtttaaatgtgtgtcaggacaaaatactaacacattatgaaaatgatagtacagacctacgtgaccatatagactattggaaacacatgcgcctagaatgtgctatttattacaaggccagagaaatgggatttaaacatattaaccaccaggtggtgccaacactggctgtatcaaagaataaagcattacaagcaattgaactgcaactaacgttagaaacaatatataactcacaatatagtaatgaaaagtggacattacaagacgttagccttgaagtgtatttaactgcaccaacaggatgtataaaaaaacatggatatacagtggaagtgcagtttgatggagacatatgcaatacaatgcattatacaaactggacacatatatatatttgtgaagaagcatcagtaactgtggtagagggacaagttgactattatggtttatattatgttcatgaaggaatacgaacatattttgtgcagtttaaagatgatgcagaaaaatatagtaaaaataaagtatgggaagttcatgcgggtggtcaggtaatattatgtcctacatctgtgtttagcagcaacgaagtatcctctcctgaaattattaggcagcacttggccaaccaccccgccgcgacccataccaaagccgtcgccttgggcaccgaagaaacacagacgactatccagcgaccaagatcagagccagacaccggaaacccctgccacaccactaagttgttgcacagagactcagtggacagtgctccaatcctcactgcatttaacagcgcacacaaaggacggattaactgtaatagtaacactacacccatagtacatttaaaaggtgatgctaatactttaaaatgtttaagatatagatttaaaaagcattgtacattgtatactgcagtgtcgtctacatggcattggacaggacataatgtaaaacataaaagtgcaattgttacacttacatatgatagtgaatggcaacgtgaccaatttttgtctcaagttaaaataccaaaaactattacagtgtctactggatttatgtctatatgacaaatcttgatactgcatccacaacattactggcgtgctttttgctttgcttttgtgtgcttttgtgtgtctgcctattaatacgtccgctgcttttgtctgtgtctacatacacatcattaataatattggtattactattgtggataacagcagcctctgcgtttaggtgttttattgtatatattatatttgtttatataccattatttttaatacatacacatgcacgctttttaattacataatgtatatgtacataatgtaattgttacatataattgttgtataccataacttactattttttcttttttattttcatatataatttttttttttgtttgtttgtttgttttttaataaactgttattacttaacaatgcgacacaaacgttctgcaaaacgcacaaaacgtgcatcggctacccaactttataaaacatgcaaacaggcaggtacatgtccacctgacattatacctaaggttgaaggcaaaactattgctgatcaaatattacaatatggaagtatgggtgtattttttggtgggttaggaattggcacagggtcgggtacaggcggacgcactgggtatattccattgggaacaaggcctcccacagctacagatacacttgctcctgtaagaccccctttaacagtagatcctgtgggcccttctgatccttctatagtttctttagtggaagaaactagttttattgatgctggtgcaccaacatctgtaccttccattcccccagatatatcaggatttagtattactacttcaactgataccacacctgctatattagatattaataatactgttactactgttactacacataataatcccactttcactgacccatctgtattgcagcctccaacacctgcagaaactggagggcattttacactttcatcatccactattagtacacataattatgaagaaattcctatggatacatttattgttagcacaaaccctaacacagtaactagtagcacacccataccagggtctcgcccagtggcacgcctaggattatatagtcgcacaacacaacaagttaaagttgtagaccctgcttttgtaaccactcccactaaacttattacatatgataatcctgcatatgaaggtatagatgtggataatacattatatttttctagtaatgataatagtattaatatagctccagatcctgactttttggatatagttgctttacataggccagcattaacctctaggcgtactggcattaggtacagtagaattggtaataaacaaacactacgtactcgtagtggaaaatctataggtgctaaggtacattattattatgatttcagtactattgatcctgcagaagaaatagaattacaaactataacaccttctacatatactaccacttcacatgcagcctcacctacttctattaataatggattatatgatatttatgcagatgactttattacagatacttctacaaccccggtaccatctgtaccctctacatctttatcaggttatattcctgcaaatacaacaattccttttggtggtgcatacaatattcctttagtatcaggtcctgatatacccattaatataactgaccaagctccttcattaattcctatagttccagggtctccacaatatacaattattgctgatgcaggtgacttttatttacatcctagttattacatgttacgaaaacgacgtaaacgtttaccatattttttttcagatgtctctttggctgcctagtgaggccactgtctacttgcctcctgtcccagtatctaaggttgtaagcacggatgaatatgttgcacgcacaaacatatattatcatgcaggaacatccagactacttgcagttggacatccctattttcctattaaaaaacctaacaataacaaaatattagttcctaaagtatcaggattacaatacagggtatttagaatacatttacctgaccccaataagtttggttttcctgacacctcattttataatccagatacacagcggctggtttgggcctgtgtaggtgttgaggtaggtcgtggtcagccattaggtgtgggcattagtggccatcctttattaaataaattggatgacacagaaaatgctagtgcttatgcagcaaatgcaggtgtggataatagagaatgtatatctatggattacaaacaaacacaattgtgtttaattggttgcaaaccacctataggggaacactggggcaaaggatccccatgtaccaatgttgcagtaaatccaggtgattgtccaccattagagttaataaacacagttattcaggatggtgatatggttgatactggctttggtgctatggactttactacattacaggctaacaaaagtgaagttccactggatatttgtacatctatttgcaaatatccagattatattaaaatggtgtcagaaccatatggcgacagcttatttttttatttacgaagggaacaaatgtttgttagacatttatttaatagggctggtactgttggtgaaaatgtaccagacgatttatacattaaaggctctgggtctactgcaaatttagccagttcaaattattttcctacacctagtggttctatggttacctctgatgcccaaatattcaataaaccttattggttacaacgagcacagggccacaataatggcatttgttggggtaaccaactatttgttactgttgttgatactacacgcagtacaaatatgtcattatgtgctgccatatctacttcagaaactacatataaaaatactaactttaaggagtacctacgacatggggaggaatatgatttacagtttatttttcaactgtgcaaaataaccttaactgcagacgttatgacatacatacattctatgaattccactattttggaggactggaattttggtctacaacctcccccaggaggcacactagaagatacttataggtttgtaacatcccaggcaattgcttgtcaaaaacatacacctccagcacctaaagaagatccccttaaaaaatacactttttgggaagtaaatttaaaggaaaagttttctgcagacctagatcagtttcctttaggacgcaaatttttactacaagcaggattgaaggccaaaccaaaatttacattaggaaaacgaaaagctacacccaccacctcatctacctctacaactgctaaacgcaaaaaacgtaagctgtaagtattgtatgtatgttgaattagtgttgtttgttgtgtatatgtttgtatgtgcttgtatgtgcttgtaaatattaagttgtatgtgtgtttgtatgtatggtataataaacacgtgtgtatgtgtttttaaatgcttgtgtaactattgtgtcatgcaacataaataaacttattgtttcaacacctactaattgtgttgtggttattcattgtatataaactatatttgctacatcctgtttttgttttatatatactatattttgtagcgccagcggccattttgtagcttcaaccgaattcggttgcatgctttttggcacaaaatgtgtttttttaaatagttctatgtcagcaactatggtttaaacttgtacgtttcctgcttgccatgcgtgccaaatccctgttttcctgacctgcactgcttgccaaccattccattgttttttacactgcactatgtgcaactactgaatcactatgtacattgtgtcatataaaataaatcactatgcgccaacgccttacataccgctgttaggcacatatttttggcttgttttaactaacctaattgcatatttggcataaggtttaaacttctaaggccaactaaatgtcaccctagttcatacatgaactgtgtaaaggttagtcatacattgttcatttgtaaaactgcacatgggtgtgtgcaaaccgttttgggttacacatttacaagcaacttatataataatactaaactacaataattcatgtataaaactaagggcgtaaccgaaatcggttgaaccgaaaccggttagtataaaagcagacattttatgcaccaaaagagaactgcaatgtttcaggacccacaggagcgacccagaaagttaccacagttatgcacagagctgcaaacaactatacatgatataatattagaatgtgtgtactgcaagcaacagttactgcgacgtgaggtatatgactttgcttttcgggatttatgcatagtatatagagatgggaatccatatgctgtatgtgataaatgtttaaagttttattctaaaattagtgagtatagacattattgttatagtttgtatggaacaacattagaacagcaatacaacaaaccgttgtgtgatttgttaattaggtgtattaactgtcaaaagccactgtgtcctgaagaaaagcaaagacatctggacaaaaagcaaagattccataatataaggggtcggtggaccggtcgatgtatgtcttgttgcagatcatcaagaacacgtagagaaacccagctgtaatcatgcatggagatacacctacattgcatgaatatatgttagatttgcaaccagagacaactgatctctactgttatgagcaattaaatgacagctcagaggaggaggatgaaatagatggtccagctggacaagcagaaccggacagagcccattacaatattgtaaccttttgttgcaagtgtgactctacgcttcggttgtgcgtacaaagcacacacgtagacattcgtactttggaagacctgttaatgggcacactaggaattgtgtgccccatctgttctcagaaaccataatctacc

SEQ ID NO: 70 - DNA, 7906 bp, Homo sapiens
  source 1..7906: mol_type = genomic DNA; note = UNCseq2344
atggctgatcctgcaggtaccaatggggaagagggtacgggatgtaatggatggttttatgtagaggctgtagtggaaaaaaaaacaggggatgctatatcagatgacgagaacgaaaatgacagtgatacaggtgaagatttggtagattttatagtaaatgataatgattatttaacacaggcagaaacagagacagcacatgcgttgtttactgcacaggaagcaaaacaacatagagatgcagtacaggttctaaaacgaaagtatttgggtagtccacttagtgatattagtggatgtgtagacaataatattagtcctagattaaaagctatatgtatagaaaaacaaagtagagctgcaaaaaggagattatttgaaagcgaagacagcgggtatggcaatactgaagtggaaactcagcagatgttacaggtagaagggcgccatgagactgaaacaccatgtagtcagtatagtggtggaagtgggggtggttgcagtcagtacagtagtggaagtgggggagagggtgttagtgaaagacacactatatgccaaacaccacttacaaatattttaaatgtactaaaaactagtaatgcaaaggcagcaatgttagcaaaatttaaagagttatacggggtgagtttttcagaattagtaagaccatttaaaagtaataaatcaacgtgttgcgattggtgtattgctgcatttggacttacacccagtatagctgacagtataaaaacactattacaacaatattgtttatatttacacattcaaagtttagcatgttcatggggaatggttgtgttactattagtaagatataaatgtggaaaaaatagagaaacaattgaaaaattgctgtctaaactattatgtgtgtctccaatgtgtatgatgatagagcctccaaaattgcgtagtacagcagcagcattatattggtataaaacaggtatatcaaatattagtgaagtgtatggagacacgccagaatggatacaaagacaaacagtattacaacatagttttaatgattgtacatttgaattatcacagatggtacaatgggcctacgataatgacatagtagacgatagtgaaattgcatataaatatgcacaattggcagacactaatagtaatgcaagtgcctttctaaaaagtaattcacaggcaaaaattgtaaaggattgtgcaacaatgtgtagacattataaacgagcagaaaaaaaacaaatgagtatgagtcaatggataaaatatagatgtgatagggtagatgatggaggtgattggaagcaaattgttatgtttttaaggtatcaaggtgtagagtttatgtcatttttaactgcattaaaaagatttttgcaaggcatacctaaaaaaaattgcatattactatatggtgcagctaacacaggtaaatcattatttggtatgagtttaatgaaatttctgcaagggtctgtaatatgttttgtaaattctaaaagccatttttggttacaaccattagcagatgccaaaataggtatgttagatgatgctacagtgccctgttggaactacatagatgacaatttaagaaatgcattggatggaaatttagtttctatggatgtaaagcatagaccattggtacaactaaaatgccctccattattaattacatctaacattaatgctggtacagattctaggtggccttatttacataatagattggtggtgtttacatttcctaatgagtttccatttgacgaaaacggaaatccagtgtatgagcttaatgataagaactggaaatcctttttctcaaggacgtggtccagattaagtttgcacgaggacgaggacaaggaaaacgatggagactctttgccaacgtttaaatgtgtgtcaggacaaaatactaacacattatgaaaatgatagtacagacctacgtgaccatatagactattggaaacacatgcgcctagaatgtgctatttattacaaggccagagaaatgggatttaaacatattaaccaccaggtggtgccaacactggctgtatcaaagaataaagcattacaagcaattgaactgcaactaacgttagaaacaatatataactcacaatatagtaatgaaaagtggacattacaagacgttagccttgaagtgtatttaactgcaccaacaggatgtataaaaaaacatggatatacagtggaagtgcagtttgatggagacatatgcaatacaatgcattatacaaactggacacatatatatatttgtgaagaagcatcagtaactgtggtagagggtcaagttgactattatggtttatattatgttcatgaaggaatacgaacatattttgtgcagtttaaagatgatgcagaaaaatatagtaaaaataaagtatgggaagttcatgcgggtggtcaggtaatattatgtcctacatctgtgtttagcagcaacgaagtatcctctcctgaaattattaggcagcacttggccaaccaccccgccgcgacccataccaaagccgtcgccttgggcaccgaagaaacacagacgactatccagcgaccaagatcagagccagacaccggaaacccctgccacaccactaagttgttgcacagagactcagtggacagtgctccaatcctcactgcatttaacagctcacacaaaggacggattaactgtaatagtaacactacacccatagtacatttaaaaggtgatgctaatactttaaaatgtttaagatatagatttaaaaagcattgtacattgtatactgcagtgtcgtctacatggcattggacaggacataatgtaaaacataaaagtgcaattgttacacttacatatgatagtgaatggcaacgtgaccaatttttgtctcaagttaaaataccaaaaactattacagtgtctactggatttatgtctatatgacaaatcttgatactgcatccacaacattactggcgtgctttttgctttgcttttgtgtgcttttgtgtgtctgcctattaatacgtccgctgcttttgtctgtgtctacatacacatcattaataatattggtattactattgtggataacagcagcctctgcgtttaggtgttttattgtatatattatatttgtttatataccattatttttaatacatacacatgcacgctttttaattacataatgtatatgtacataatgtaattgttacatataattgttgtataccataacttactattttttcttttttattttcatatataatttttttttttgtttgtttgtttggtttttaataaactgttattacttaacaatgcgacacaaacgttctgcaaaacgcacaaaacgtgcatcggctacccaactttataaaacatgcaaacaggcaggtacatgtccacctgacattatacctaaggttgaaggcaaaactattgctgatcaaatattacaatatggaagtatgggtgtattttttggtgggttaggaattggaacagggtcgggtacaggcggacgcactgggtatattccattgggaacaaggcctcccacagctacagatacacttgctcctgtaagaccccctttaacagtagatcctgtgggcccttctgatccttctatagtttctttagtggaagaaactagttttattgatgctggtgcaccaacatctgtaccttccattcccccagatgtatcaggatttagtattactacttcaactgataccacacctgctatattagatattaataatactgttactactgttactacacataataatcccactttcactgacccatctgtattgcagcctccaacacctgcagaaactggagggcattttacactttcatcatccactattagtacacataattatgaagaaattcctatggatacatttattgttagcacaaaccctaacacagtaactagtagcacacccataccagggtctcgcccagtggcacgcctaggattatatagtcgcacaacacaacaagttaaagttgtagaccctgcttttgtaaccactcccactaaacttattacatatgataatcctgcatatgaaggtatagatgtggataatacattatatttttctagtaatgataatagtattaatatagctccagatcctgactttttggatatagttgctttacataggccagcattaacctctaggcgtactggcattaggtacagtagaattggtaataaacaaacactacgtactcgtagtggaaaatctataggtgctaaggtacattattattatgatttcagtactattgatcctgcagaagaaatagaattacaaactataacaccttctacatatactaccacttcacatgcagcctcacctacttctattaataatggattatatgatatttatgcagatgactttattacagatacttctacaaccccggtaccatctgtaccctctacatctttatcaggttatattcctgcaaatacaacaattccttttggtggtgcatacaatattcctttagtatcaggtcctgatatacccattaatataactgaccaagctccttcattaattcctatagttccagggtctccacaatatacaattattgctgatgcaggtgacttttatttacatcctagttattacatgttacgaaaacgacgtaaacgtttaccatattttttttcagatgtctctttggctgcctagtgaggccactgtctacttgcctcctgtcccagtatctaaggttgtaagcacggatgaatatgttgcacgcacaaacatatattatcatgcaggaacatccagactacttgcagttggacatccctattttcctattaaaaaacctaacaataacaaaatattagttcctaaagtatcaggattacaatacagggtatttagaatacatttacctgaccccaataagtttggttttcctgacacctcattttataatccagatacacagcggctggtttgggcctgtgtaggtgttgaggtaggtcgtggtcagccattaggtgtgggcattagtggccatcctttattaaataaattggatgacacagaaaatgctagtgcttatgcagcaaatgcaggtgtggataatagagaatgtatatctatggattacaaacaaacacaattgtgtttaattggttgcaaaccacctataggggaacactggggcaaaggatccccatgtaccaatgttgcagtaaatccaggtgattgtccaccattagagttaataaacacagttattcaggatggtgatatggttgatactggctttggtgctatggactttactacattacaggctaacaaaagtgaagttccactggatatttgtacatctatttgcaaatatccagattatattaaaatggtgtcagaaccatatggcgacagcttatttttttatttacgaagggaacaaatgtttgttagacatttatttaatagggctggtactgttggtgaaaatgtaccagacgatttatacattaaaggctctgggtctactgcaaatttagccagttcaaattattttcctacacctagtggttctatggttacctctgatgcccaaatattcaataaaccttattggttacaacgagcacagggccacaataatggcatttgttggggtaaccaactatttgttactgttgttgatactacacgcagtacaaatatgtcattatgtgctgccatatctacttcagaaactacatataaaaatactaactttaaggagtacctacgacatggggaagaatatgatttacagtttatttttcaactgtgcaaaataaccttaactgcagacgttatgacatacatacattctatgaattccactattttggaggactggaattttggtctacaacctcccccaggaggcacactagaagatacttataggtttgtaacatcccaggcaattgcttgtcaaaaacatacacctccagcacctaaagaagatccccttaaaaaatacactttttgggaagtaaatttaaaggaaaagttttctgcagacctagatcagtttcctttaggacgcaaatttttactacaagcaggattgaaggccaaaccaaaatttacattaggaaaacgaaaagctacacccaccacctcatctacctctacaactgctaaacgcaaaaaacgtaagctgtaagtattgtatgtatgttgaattagtgttgtttgttgtgtatatgtttgtatgtgcttgtatgtgcttgtaaatattaagttgtatgtgtgtttgtatgtatggtataataaacacgtgtgtatgtgtttttaaatgcttgtgtaactattgtgtcatgcaacataaataaacttattgtttcaacacctactaattgtgttgtggttattcattgtatataaactatatttgctacatcctgtttttgttttatatatactatattttgtagcgccagcggccattttgtagcttcaaccgaattcggttgcatgctttttggcacaaaatgtgtttttttaaatagttctatgtcagcaactatggtttaaacttgtacgtttcctgcttgccatgcgtgccaaatccctgttttcctgacctgcactgcttgccaaccattccattgttttttacactgcactatgtgcaactactgaatcactatgtacattgtgtcatataaaataaatcactatgcgccaacgccttacataccgctgttaggcacatatttttggcttgttttaactaacctaattgcatatttggcataaggtttaaacttctaaggccaactaaatgtcaccctagttcatacatgaactgtgtaaaggttagtcatacattgttcatttgtaaaactgcacatgggtgtgtgcaaaccgttttgggttacacatttacaagcaacttatataataatactaaactacaataattcatgtataaaactaagggcgtaaccgaaatcggttgaaccgaaaccggttagtataaaagcagacattttatgcaccaaaagagaactgcaatgtttcaggacccacaggagcgacccagaaagttaccacagttatgcacagagctgcaaacaactatacatgatataatattagaatgtgtgtactgcaagcaacagttactgcgacgtgaggtatatgactttgcttttcgggatttatgcatagtatatagagatgggaatccatatgctgtatgtgataaatgtttaaagttttattctaaaattagtgagtatagacattattgttatagtttgtatggaacaacattagaacagcaatacaacaaaccgttgtgtgatttgttaattaggtgtattaactgtcaaaagccactgtgtcctgaagaaaagcaaagacatctggacaaaaagcaaagattccataatataaggggtcggtggaccggtcgatgtatgtcttgttgcagatcatcaagaacacgtagagaaacccagctgtaatcatgcatggagatacacctacattgcatgaatatatgttagatttgcaaccagagacaactgatctctactgttatgagcaattaaatgacagctcagaggaggaggatgaaatagatggtccagctggacaagcagaaccggacagagcccattacaatattgtaaccttttgttgcaagtgtgactctacgcttcggttgtgcgtacaaagcacacacgtagacattcgtactttggaagacctgttaatgggcacactaggaattgtgtgccccatctgttctcagaaaccataatctacc

SEQ ID NO: 71 - DNA, 7906 bp, Homo sapiens
  source 1..7906: mol_type = genomic DNA; note = UNCseq2376
atggctgatcctgcaggtaccaatggggaagagggtacgggatgtaatggatggttttatgtagaggctgtagtggaaaaaaaaacaggggatgctatatcagatgacgagaacgaaaatgacagtgatacaggtgaagatttggtagattttatagtaaatgataatgattatttaacacaggcagaaacagagacagcacatgcgttgtttactgcacaggaagcaaaacaacatagagatgcagtacaggttctaaaacgaaagtatttgggtagtccacttagtgatattagtggatgtgtagacaataatattagtcctagattaaaagctatatgtatagaaaaacaaagtagagctgcaaaaaggagattatttgaaagcgaagacagcgggtatggcaatactgaagtggaaactcagcagatgttacaggtagaagggcgccatgagactgaaacaccatgtagtcagtatagtggtggaagtgggggtggttgcagtcagtacagtagtggaagtgggggagagggtgttagtgaaagacacactatatgccaaacaccacttacaaatattttaaatgtactaaaaactagtaatgcaaaggcagcaatgttagcaaaatttaaagagttatacggggtgagtttttcagaattagtaagaccatttaaaagtaataaatcaacgtgttgcgattggtgtattgctgcatttggacttacacccagtatagctgacagtataaaaacactattacaacaatattgtttatatttacacattcaaagtttagcatgttcatggggaatggttgtgttactattagtaagatataaatgtggaaaaaatagagaaacaattgaaaaattgctgtctaaactattatgtgtgtctccaatgtgtatgatgatagagcctccaaaattgcgtagtacagcagcagcattatattggtataaaacaggtatatcaaatattagtgaagtgtatggagacacgccagaatggatacaaagacaaacagtattacaacatagttttaatgattgtacatttgaattatcacagatggtacaatgggcctacgataatgacatagtagacgatagtgaaattgcatataaatatgcacaattggcagacactaatagtaatgcaagtgcctttctaaaaagtaattcacaggcaaaaattgtaaaggattgtgcaacaatgtgtagacattataaacgagcagaaaaaaaacaaatgagtatgagtcaatggataaaatatagatgtgatagggtagatgatggaggtgattggaagcaaattgttatgtttttaaggtatcaaggtgtagagtttatgtcatttttaactgcattaaaaagatttttgcaaggcatacctaaaaaaaattgcatattactatatggtgcagctaacacaggtaaatcattatttggtatgagtttaatgaaatttctgcaagggtctgtaatatgttttgtaaattctaaaagccatttttggttacaaccattagcagatgccaaaataggtatgttagatgatgctacagtgccctgttggaactacatagatgacaatttaagaaatgcattggatggaaatttagtttctatggatgtaaagcatagaccattggtacaactaaaatgccctccattattaattacatctaacattaatgctggtacagattctaggtggccttatttacataatagattggtggtgtttacatttcctaatgagtttccatttgacgaaaacggaaatccagtgtatgagcttaatgataagaactggaaatcctttttctcaaggacgtggtccagattaagtttgcacgaggacgaggacaaggaaaacgatggagactctttgccaacgtttaaatgtgtgtcaggacaaaatactaacacattatgaaaatgatagtacagacctacgtgaccatatagactattggaaacacatgcgcctagaatgtgctatttattacaaggccagagaaatgggatttaaacatattaaccaccaggtggtgccaacactggctgtatcaaagaataaagcattacaagcaattgaactgcaactaacgttagaaacaatatataactcacaatatagtaatgaaaagtggacattacaagacgttagccttgaagtgtatttaactgcaccaacaggatgtataaaaaaacatggatatacagtggaagtgcagtttgatggagacatatgcaatacaatgcattatacaaactggacacatatatatatttgtgaagaaacatcagtaactgtggtagagggtcaagttgactattatggtttatattatgttcatgaaggaatacgaacatattttgtgcagtttaaagatgatgcagaaaaatatagtaaaaataaagtatgggaagttcatgcgggtggtcaggtaatattatgtcctacatctgtgtttagcagcaacgaagtatcctctcctgaaattattaggcagcacttggccaaccaccccgccgcgacccataccaaagccgtcgccttgggcaccgaagaaacacagacgactatccagcgaccaagatcagagccaaacaccggaaacccctgccacaccactaagttgttgcacagagactcagtggacagtgctccaatcctcactgcatttaacagctcacacaaaggacggattaactgtaatagtaacactacacccatagtacatttaaaaggtgatgctaatactttaaaatgtttaagatatagatttaaaaagcattgtacattgtatactgcagtgtcgtctacatggcattggacaggacataatgtaaaacataaaagtgcaattgttacacttacatatgatagtgaatggcaacgtgaccaatttttgtctcaagttaaaataccaaaaactattacagtgtctactggatttatgtctatatgacaaatcttgatactgcatccacaacattactggcgtgctttttgctttgcttttgtgtgcttttgtgtgtctgcctattaatacgtccgctgcttttgtctgtgtctacatacacatcattaataatattggtattactattgtggataacagcagcctctgcgtttaggtgttttattgtatatattatatttgtttatataccattatttttaatacatacacatgcacgctttttaattacataatgtatatgtacataatgtaattgttacatataattgttgtataccataacttactattttttcttttttattttcatatataatttttttttttgtttgtttgtttgttttttaataaactgttatcacttaacaatgcgacacaaacgttctgcaaaacgcacaaaacgtgcatcggctacccaactttataaaacatgcaaacaggcaggtacatgtccacctgacattatacctaaggttgaaggcaaaactattgctgatcaaatattacaatatggaagtatgggtgtattttttggtgggttaggaattggaacagggtcgggtacgggcggacgcactgggtatattccattgggaacaaggcctcccacagctacagatacacttgctcctgtaagaccccctttaacagtagatcctgtgggcccttctgatccttctatagtttctttagtggaagaaactagttttattgatgctggtgcaccaacatctgtaccttccattcccccagatgtatcaggatttagtattactacttcaactgataccacacctgctatattagatattaataatactgttactactgttactacacataataatcccactttcactgacccatctgtattgcagcctccaacacctgcagaaactggagggcattttacactttcatcatccactattagtacacataattatgaagaaattcctatggatacatttattgttagcacaaaccctaacacagtaactagtagcacacccataccagggtctcgcccagtggcacgcctaggattatatagtcgcacaacacaacaagttaaagttgtagaccctgcttttgtaaccactcccactaaacttattacatatgataatcctgcatatgaaggtatagatgtggataatacattatatttttctagtaatgataatagtattaatatagctccagatcctgactttttggatatagttgctttacataggccagcattaacctctaggcgtactggcattaggtacagtagaattggtaataaacaaacactacgtactcgtagtggaaaatctataggtgctaaggtacattattattatgatttcagtactattgatcctgcagaagaaatagaattacaaactataacaccttctacatatactaccacttcacatgcagcctcacctacttctattaataatggattatatgatatttatgcagatgactttattacagatacttctacaaccccggtaccatctgtaccctctacatctttatcaggttatattcctgcaaatacaacaattccttttggtggtgcatacaatattcctttagtatcaggtcctgatatacccattaatataactgaccaagctccttcattaattcctatagttccagggtctccacaatatacaattattgctgatgcaggtgacttttatttacatcctagttattacatgttacgaaaacgacgtaaacgtttaccatattttttttcagatgtctctttggctgcctagtgaggccactgtctacttgcctcctgtcccagtatctaaggttgtaagcacggatgaatatgttgcacgcacaaacatatattatcatgcaggaacatccagactacttgcagttggacatccctattttcctattaaaaaacctaacaataacaaaatattagttcctaaagtatcaggattacaatacagggtatttagaatacatttacctgaccccaataagtttggttttcctgacacctcattttataatccagatacacagcggctggtttgggcctgtgtaggtgttgaggtaggtcgtggtcagccattaggtgtgggcattagtggccatcctttattaaataaattggatgacacagaaaatgctagtgcttatgcagcaaatgcaggtgtggataatagagaatgtatatctatggattacaaacaaacacaattgtgtttaattggttgcaaaccacctataggggaacactggggcaaaggatccccatgtaccaatgttgcagtaaatccaggggattgtccaccattagagttaataaacacagttattcaggatggtgatatggttgatactggctttggtgctatggactttactacattacaggctaacaaaagtgaagttccactggatatttgtacatctatttgcaaatatccagattatattaaaatggtgtcagaaccatatggcgacagcttatttttttatttacgaagggaacaaatgtttgttagacatttatttaatagggctggtgctgttggtgaaaatgtaccagacgatttatacattaaaggctctgggtctaccgcaaatttagccagttcaaattattttcctacacctagtggttctatggttacctctgatgcccaaatattcaataaaccttattggttacaacgagcacagggccacaataatggcatttgttggggtaaccaactatttgttactgttgttgatactacacgcagtacaaatatgtcattatgtgctgccatatctacttcagaaactacatataaaaatactaactttaaggagtacctacgacatggggaggaatatgatttacagtttatttttcaactgtgcaaaataaccttaactgcagacgttatgacatacatacattctatgaattccactattttggaggactggaattttggtctacaacctcccccaggaggcacactagaagatacttataggtttgtaacatcccaggcaattgcttgtcaaaaacatacacctccagcacctaaagaagatccccttaaaaaatacactttttgggaagtaaatttaaaggaaaagttttctgcagacctagatcagtttcctttaggacgcaaatttttactacaagcaggattgaaggccaaaccaaaatttacattaggaaaacgaaaagctacacccaccacctcatctacctctacaactgctaaacgcaaaaaacgtaagctgtaagtattgtatgtatgttgaattagtgttgtttgttgtgtatatgtttgtatgtgcttgtatgtgcttgtaaatattaagttgtatgtgtgtttgtatgtatggtataataaacacgtgtgtatgtgtttttaaatgcttgtgtaactattgtgtcatgcaacataaataaacttattgtttcaacacctactaattgtgttgtggttattcattgtatataaactatatttgctacatcctgtttttgttttatatatactatattttgtagcgccagcggccattttgtagcttcaaccgaattcggttgcatgctttttggcacaaaatgtgtttttttaaatagttctatgtcagcaactatggtttaaacttgtacgtttcctgcttgccatgcgtgccaaatccctgttttcctgacctgcactgcttgccaaccattccattgttttttacactgcactatgtgcaactactgaatcactatgtacattgtgtcatataaaataaatcactatgcgccaacgccttacataccgctgttaggcacatatttttggcttgttttaactaacctaattgcatatttggcataaggtttaaacttctaaggccaactaaatgtcaccctagttcatacatgaactgtgtaaaggttagtcatacattgttcatttgtaaaactgcacatgggtgtgtgcaaaccgttttgggttacacatttacaagcaacttatataataatactaaactacaataattcatgtataaaactaagggcgtaaccgaaatcggttgaaccgaaaccggttagtataaaagcagacattttatgcaccaaaagagaactgcaatgtttcaggacccacaggagcgacccagaaagttaccacagttatgcacagagctgcaaacaactatacatgatataatattagaatgtgtgtactgcaagcaacagttactgcgacgtgaggtatatgactttgcttttcgggatttatgcatagtatatagagatgggaatccatatgctgtatgtgataaatgtttaaagttttattctaaaattagtgagtatagacattattgttatagtttgtatggaacaacattagaacagcaatacaacaaaccgttgtgtgatttgttaattaggtgtattaactgtcaaaagccactgtgtcctgaagaaaagcaaagacatctggacaaaaagcaaagattccataatataaggggtcggtggaccggtcgatgtatgtcttgttgcagatcatcaagaacacgtagagaaacccagctgtaatcatgcatggagatacacctacattgcatgaatatatgttagatttgcaaccagagacaactgatctctactgttatgagcaattaaatgacagctcagaggaggaggatgaaatagatggtccagctggacaagcagaaccggacagagcccattacaatattgtaaccttttgttgcaagtgtgactctacgcttcggttgtgcgtacaaagcacacacgtagacattcgtactttggaagacctgttaatgggcacactaggaattgtgtgccccatctgttctcagaaaccataatctacc

SEQ ID NO: 72 - DNA, 7906 bp, Homo sapiens
  source 1..7906: mol_type = genomic DNA; note = UNCseq2393
atggctgatcctgcaggtaccaatggggaagagggtacgggatgtaatggatggttttatgtagaggctgtagtggaaaaaaaaacaggggatgctatatcagatgacgagaacgaaaatgacagtgatacaggtgaagatttggtagattttatagtaaatgataatgattatttaacacaggcagaaacagagacagcacatgcgttgtttactgcacaggaagcaaaacaacatagagatgcagtacaggttctaaaacgaaagtatttgggtagtccacttagtgatattagtggatgtgtagacaataatattagtcctagattaaaagctatatgtatagaaaaacaaagtagagctgcaaaaaggagattatttgaaagcgaagacagcgggtatggcaatactgaagtggaaactcagcagatgttacaggtagaagggcgccatgagactgaaacaccatgtagtcagtatagtggtggaagtgggggtggttgcagtcagtacagtagtggaagtgggggagagggtgttagtgaaagacacactatatgccaaacaccacttacaaatattttaaatgtactaaaaactagtaatgcaaaggcagcaatgttagcaaaatttaaagagttatacggggtgagttttacagaattagtaagaccatttaaaagtaataaatcaacgtgttgcgattggtgtattgctgcatttggacttacacccagtatagctgacagtataaaaacactattacaacaatattgtttatatttacacattcaaagtttagcatgttcatggggaatggttgtgttactattagtaagatataaatgtggaaaaaatagagaaacaattgaaaaattgctgtctaaactattatgtgtgtctccaatgtgtatgatgatagagcctccaaaattgcgtagtacagcagcagcattatattggtataaaacaggtatatcaaatattagtgaagtgtatggagacacgccagaatggatacaaagacaaacagtattacaacatagttttaatgattgtacatttgaattatcacagatggtacaatgggcctacgataatgacatagtagacgatagtgaaattgcatataaatatgcacaattggcagacactaatagtaatgcaagtgcctttctaaaaagtaattcacaggcaaaaattgtaaaggattgtgcaacaatgtgtagacattataaacgagcagaaaaaaaacaaatgagtatgagtcaatggataaaatatagatgtgatagggtagatgatggaggtgattggaagcaaattgttatgtttttaaggtatcaaggtgtagagtttatgtcatttttaactgcattaaaaagatttttgcaaggcatacctaaaaaaaattgcatattactatatggtgcagctaacacaggtaaatcattatttggtatgagtttaatgaaatttctgcaagggtctgtaatatgttttgtaaattctaaaagccatttttggttacaaccattagcagatgccaaaataggtatgttagatgatgctacagtgccctgttggaactacatagatgacaatttaagaaatgcattggatggaaatttagtttctatggatgtaaagcatagaccattggtacaactaaaatgccctccattattaattacatctaacattaatgctggtacagattctaggtggccttatttacataatagattggtggtgtttacatttcctaatgagtttccatttgacgaaaacggaaatccagtgtatgagcttaatgataagaactggaaatcctttttctcaaggacgtggtccagattaagtttgcacgaggacgaggacaaggaaaacgatggagactctttgccaacgtttaaatgtgtgtcaggacaaaatactaacacattatgaaaatgatagtacagacctacgtgaccatatagactattggaaacacatgcgcctagaatgtgctatttattacaaggccagagaaatgggatttaaacatattaaccaccaggtggtgccaacgctggctgtatcaaagaataaagcattacaagcaattgaactgcaactaacgttagaaacaatatataactcacaatatagtaatgaaaagtggacattacaagacgttagccttgaagtgtatttaactgcaccaacaggatgtataaaaaaacatggatatacagtggaagtgcagtttgatggagacatatgcaatacaatgcattatacaaactggacacatatatatatttgtgaagaagcatcagtaactgtggtagagggtcaagttgactattatggtttatattatgttcatgaaggaatacgaacatattttgtgcagtttaaagatgatgcagaaaaatatagtaaaaataaagtatgggaagttcatgcgggtggtcaggtaatattatgtcctacatctgtgtttagcagcaacgaagtatcctctcctgaaattattaggcagcacttggccaaccaccccgccgcgacccataccaaagccgtcgccttgggcaccgaagaaacacagacgactatccagcgaccaagatcagagccagacaccggaaacccctgccacaccactaagttgttgcacagagactcagtggacagtgctccaatcctcactgcatttaacagctcacacaaaggacggattaactgtaatagtaacactacacccatagtacatttaaaaggtgatgctaatactttaaaatgtttaagatatagatttaaaaagcattgtacattgtatactgcagtgtcgtctacatggcattggacaggacataatgtaaaacataaaagtgcaattgttacacttacatatgatagtgaatggcaacgtgaccaatttttgtctcaagttaaaataccaaaaactattacagtgtctactggatttatgtctatatgacaaatcttgatactgcatccacaacattactggcgtgctttttgctttgcttttgtgtgcttttgtgtgtctgcctattaatacgtccgctgcttttgtctgtgtctacatacacatcattaatactattggtattactattgtggataacagcagcctctgcgtttaggtgttttattgtatatattgtatttgtttatataccattatttttaatacatacacatgcacgctttttaattacataatgtatatgtacataatgtaattgttacatataattgttgtataccataacttactactttttcttttttatttttatatataatttttttttttgtttgtttgtttgttttttaataaactgttatcacttaacaatgcgacacaaacgttctgcaaaacgcacaaaacgtgcatcggctacccaactttataaaacatgcaaacaggcaggtacatgtccacctgacattatacctaaggttgaaggcaaaactattgctgatcaaatattacaatatggaagtatgggtgtattttttggtgggttaggaattggaacagggtcgggtacaggcggacgcactgggtatattccattgggaacaaggcctcccacagctacagatacacttgctcctgtaagaccccctttaacagtagatcctgtgggcccttctgatccttctatagtttctttagtggaagaaactagttttattgatgctggtgcaccaacatctgtaccttccattcccccagatgtatcaggatttagtattactacttcaactgataccacacctgctatattagatattaataatactgttactactgttactacacataataatcccactttcactgacccatctgtattgcagcctccaacacctgcagaaactggagggcattttacactttcatcatccactattagtacacataattatgaagaaattcctatggatacatttattgttagcacaaaccctaacacagtaactagtagcacacccataccagggtctcgcccagtggcacgcctaggattatatagtcgcacaacacaacaagttaaagttgtagaccctgcttttgtaaccactcccactaaacttattacatatgataatcctgcatatgaaggtatagatgtggataatacattatattttaatagtaatgataatagtattaatatagctccagatcctgactttttggatatagttgctttacataggccagcattaacctctaggcgtactggcattaggtacagtagaattggtaataaacaaacactacgtactcgtagtggaaaatctataggtgctaaggtacattattattatgatttgagtactattgatcctgcagaagaaatagaattacaaactataacaccttctacatatactaccacttcacatgcagcctcacctacttctattaataatggattatatgatatttatgcagatgactttattacagatacttctacaaccccggtaccatctgtaccctctacatctttatcaggttatattcctgcaaatacaacaattccttttggtggtgcatacaatattcctttagtatcaggtcctgatatacccattaatataactgaccaagctccttcattaattcctatagttccagggtctccacaatatacaattattgctgatgcaggtgacttttatttacatcctagttattacatgttacgaaaacgacgtaaacgtttaccatattttttttcaaatgtctctttggctgcctagtgaggccactgtctacttgcctcctgtcccagtatctaaggttgtaagcacggatgaatatgttgcacgcacaaacatatattatcatgcaggaacatccagactacttgcagttggacatccctattttcctattaaaaaacctaacaataacaaaatattagttcctaaagtatcaggattacaatacagggtatttagaatacatttacctgaccccaataagtttggttttcctgacacctcattttataatccagatacacagcggctggtttgggcctgtgtaggtgttgaggtaggtcgtggtcagccattaggtgtgggcattagtggccatcctttattaaataaattggatgacacagaaaatgctagtgcttatgcagcaaatgcaggtgtggataatagagaatgtatatctatggattacaaacaaacacaattgtgtttaattggttgcaaaccacctataggggaacactggggcaaaggatccccatgtaccaatgttgcagtaaatccaggtgattgtccaccattagagttaataaacacagttattcaggatggtgatatggttgatactggctttggtgctatggactttactacattacaggctaacaaaagtgaagttccactggatatttgtacatctatttgcaaatatccagattatattaaaatggtgtcagaaccatatggcgacagcttatttttttatttacgaagggaacaaatgtttgttagacatttatttaatagggctggtgctgttggtgaaaatgtaccagacgatttatacattaaaggctctgggtctactgcaaatttagccagttcaaattattttcctacacctagtggttctatggttacctctgatgcccaaatattcaataaaccttattggttacaacgagcacagggccacaataatggcatttgttggggtaaccaactatttgttactgttgttgatactacacgcagtacaaatatgtcattatgtgctgccatatctacttcagaaactacatataaaaatactaactttaaggagtacctacgacatggggaggaatatgatttacagtttatttttcaactgtgcaaaataaccttaactgcagacgttatgacatacatacattctatgaattccactattttggaggactggaattttggtctacaaccccccccaggaggcacactagaagatacttataggtttgtaacatcccaggcaattgcttgtcaaaaacatacacctccagcacctaaagaagatccccttaaaaaatacactttttgggaagtaaatttaaaggaaaagttttctgcagacctagatcagtttcctttaggacgcaaatttttactacaagcaggattgaaggccaaaccaaaatttacattaggaaaacgaaaagctacacccaccacctcatctacctctacaactgctaaacgcaaaaaacgtaagctgtaagtattgtatgtatgttgcattagtgttgtttgttgtgtatatgtttgtatgtgcttgtatgtgcttgtaaatattaagttgtatgtgtgtttgtatgtatggtataataaacacgtgtgtatgtgtttttaaatgcttgtgtaactattgtgtgatgcaacataaataaacttattgtttcaacacctactaattgtgttgtggttattcattgtatataaactatatttgctacatcctgtttttgttttatatatactatattttgtagcgccagcggccattttgtagcttcaaccgaattcggttgcatgctttttggcacaaaatgtgtttttttaaatagttctatgtcagcaactatagtttaaacttgtacgtttcctgcttgccatgcgtgccaaatccctgttttcctgacctgcactgcttgccaaccattccattgttttttacactgcactatgtgcaactactgaatcactatgtacattgtgtcatataaaataaatcactatgcgccaacgccttacataccgctgttaggcacatatttttggcttgttttaactaacctaattgcatatttggcataaggtttaaacttctaaggccaactaaatgtcaccctagttcatacatgaactgtgtaaaggttagtcatacattgttcatttgtaaaactgcacatgggtgtgtgcaaaccgttttgggttacacatttacaagcaacttatataataatactaaactacaataatccatgtataaaactaagggcgtaaccgaaatcggttgaaccgaaaccggttagtataaaagcagacattttatgcaccaaaagagaactgcaatgtttcaggacccacaggagcgacccagaaagttaccacagttatgcacagagctgcaaacaactatacatgatataatattagaatgtgtgtactgcaagcaacagttactgcgacgtgaggtatatgactttgcttttcgggatttatgcatagtatatagagatgggaatccatatgctgtatgtgataaatgtttaaagttttattctaaaattagtgagtatagacattattgttatagtttgtatggaacaacattagaacagcaatacaacaaaccgttgtgtgatttgttaattaggtgtattaactgtcaaaagccactgtgtcctgaagaaaagcaaagacatctggacaaaaagcaaagattccataatataaggggtcggtggaccggtcgatgtatgtcttgttgcagatcatcaagaacacgtagagaaacccagctgtaatcatgcatggagatacacctacattgcatgaatatatgttagatttgcaaccagagacaactgatctctactgttatgagcaattaaatgacagctcagaggaggaggatgaaatagatggtccagctggacaagcagaaccggacagagcccattacaatattgtaaccttttgttgcaagtgtgactctacgcttcggttgtgcgtacaaagcacacacgtagacattcgtactttggaagacctgttaatgggcacactaagaattgtgtgccccatctgttctcagaaaccataatctacc

SEQ ID NO: 73 - DNA, 7906 bp, Homo sapiens
  source 1..7906: mol_type = genomic DNA; note = UNCseq2413
atggctgatcctgcaggtaccaatggggaagagggtacgggatgtaatggatggttttatgtagaggctgtagtggaaaaaaaaacaggggatgctatatcagatgacgagaacgaaaatgacagtgatacaggtgaagatttggtagattttatagtaaatgataatgattatttaacacaggcagaaacagagacagcacatgcgttgtttactgcacaggaagcaaaacaacatagagatgcagtacaggttctaaaacgaaagtatttgggtagtccacttagtgatattagtggatgtgtagacaataatattagtcctagattaaaagctatatgtatagaaaaacaaagtagagctgcaaaaaggagattatttgaaagcgaagacagcgggtatggcaatactgaagtggaaactcagcagatgttacaggtagaagggcgccatgagactgaaacaccatgtagtcagtatagtggtggaagtgggggtggttgcagtcagtacagtagtggaagtgggggagagggtgttagtgaaagacacactatatgccaaacaccacttacaaatattttaaatgtactaaaaactagtaatgcaaaggcagcaatgttagcaaaatttaaagagttatacggggtgagtttttcagaattagtaagaccatttaaaagtaataaatcaacgtgttgcgattggtgtattgctgcattcggacttacacccagtatagctgacagtataaaaacactattacaacaatattgtttatatttacacattcaaagtttagcatgttcatggggaatggttgtgttactattagtaagatataaatgtggaaaaaatagagaaacaattgaaaaattgctgtctaaactattatgtgtgtctccaatgtgtatgatgatagagcctccaaaattgcgtagtacagcagcagcattatattggtataaaacaggtatatcaaatattagtgaagtgtatggagacacgccagaatggatacaaagacaaacagtattacaacatagttttaatgattgtacatttgaattatcacagatggtacaatgggcctacgataatgacatagtagacgatagtgaaattgcatataaatatgcacaattggcagacactaatagtaatgcaagtgcctttctaaaaagtaattcacaggcaaaaattgtaaaggattgtgcaacaatgtgtagacattataaacgagcagaaaaaaaacaaatgagtatgagtcaatggataaaatatagatgtgatagggtagatgatggaggtgattggaagcaaattgttatgtttttaaggtatcaaggtgtagagtttatgtcatttttaactgcattaaaaagatttttgcaaggcatacctaaaaaaaattgcatattactatatggtgcagctaacacaggtaaatcattatttggtatgagtttaatgaaatttctgcaagggtctgtaatatgttttgtaaattctaaaagccatttttggttacaaccattagcagatgccaaaataggtatgttagatgatgctacagtgccctgttggaactacatagatgacaatttaagaaatgcattggatggaaatttagtttctatggatgtaaagcatagaccattggtacaactaaaatgccctccattattaattacatctaacattaatgctggtacagattctaggtggccttatttacataatagattggtggtgtttacatttcctaatgagtttccatttgacgaaaacggaaatccagtgtatgagcttaatgataagaactggaaatcctttttctcaaggacgtggtccagattaagtttgcacgaggacgaggacaaggaaaacgatggagactctttgccaacgtttaaatgtgtgtcaggacaaaatactaacacattatgaaaatgatagtacagacctacgtgaccatatagactattggaaacacatgcgcctagaatgtgctatttattacaaggccagagaaatgggattgaaacatattaaccaccaggtggtgccaacactggctgtatcaaagaataaagcattacaagcaattgaactgcaactaacgttagaaacaatatataactcacaatatagtaatgaaaagtggacattacaagacgttagccttgaagtgtatttaactgcaccaacaggatgtataaaaaaacatggatatacagtggaagtgcagtttgatggagacatatgcaatacaatgcattatacaaactggacacatatatatatttgtgaagaagcatcagtaactgtggtagagggacaagttgactattatggtttatattatgttcatgaaggaatacgaacatattttgtgcagtttaaagatgatgcagaaaaatatagtaaaaataaagtatgggaagttcatgcgggtggtcaggtaatattatgtcctacatctgtgtttagcagcaacgaagtatcctctcctgaaattattaggcagcacttggccaaccaccccgccgcgacccataccaaagccgtcgccttgggcaccgaagaaacacagacgactatccagcgaccaagatcagagccagacaccggaaacccctgccacaccactaagttgttgcacagagactcagtggacagtgctccaatcctcactgcatttaacagcgcacacaaaggacggattaactgtaatagtaacactacacccatagtacatttaaaaggtgatgctaatactttaaaatgtttaagatatagatttaaaaagcattgtacattgtatactgcagtgtcgtctacatggcattggacaggacataatgtaaaacataaaagtgcaattgttacacttacatatgatagtgaatggcaacgtgaccaatttttgtctcaagttaaaataccaaaaactattacagtgtctactggatttatgtctatatgacaaatcttgatactgcatccacaacattactggcgtgctttttgctttgcttttgtgtgcttttgtgtgtctgcctattaatacgtccgctgcttttgtctgtgtctacatacacatcattaataatattggtattactattgtggataacagcagcctctgcgtttaggtgttttattgtatatattatatttgtttatataccattatttttaatacatacacatgcacgctttttaattacgtaatgtatatgtacataatgtaattgttacatataattgttgtataccataacttactattttttcttttttattttcatatataatttttttttttgtttgtttgtttgttttttaataaactgttattacttaacaatgcgacacaaacgttctgcaaaacgcacaaaacgtgcatcggctacccaactttataaaacatgcaaacaggcaggtacatgtccacctgacattatacctaaggttgaaggcaaaactattgctgatcaaatattacaatatggaagtatgggtgtattttttggtgggttaggaattggcacagggtcgggtacaggcggacgcactgggtatattccattgggaacaaggcctcccacagctacagatacacttgctcctgtaagaccccctttaacagtagatcctgtgggcccttctgatccttctatagtttctttagtggaagaaactagttttattgatgctggtgcaccaacatctgtaccttccattcccccagatgtatcaggatttagtattactacttcaactgataccacacctgctatattagatattaataatactgttactactgttactacacataataatcccactttcactgacccatctgtattgcagcctccaacacctgcagaaactggagggcattttacactttcatcatccactattagtacacataattatgaagaaattcctatggatacatttattgttagcacaaaccctaacacagtaactagtagcacacccataccagggtctcgcccagtggcacgcctaggattatatagtcgcacaacacaacaagttaaagttgtagaccctgcttttgtaaccactcccactaaacttattacatatgataatcctgcatatgaaggtatagatgtggataatacattatatttttctaataatgataatagtattaatatagctccagatcctgactttttggatatagttgctttacataggccagcattaacctctaggcgtactggcattaggtacagtagaattggtaataaacaaacactacgtactcgtagtggaaaatctataggtgctaaggtacattattattatgatttcagtactattgatcctgcagaagaaatagaattacaaactataacaccttctacatatactaccacttcacatgcagcctcacctacttctattaataatggattatatgatatttatgcagatgactttattacacatacttctacaaccccggtaccatctgtaccctctacatctttatcaggttatattcctgcaaatacaacaattccttttggtggtgcatacaatattcctttagtatcaggtcctgatatacccattaatataactgaccaagctccttcattaattcctatagttccagggtctccacaatatacaattattgctgatgcaggtgacttttatttacatcctagttattacatgttacgaaaacgacgtaaacgtttaccatattttttttcagatgtctctttggctgcctagtgaggccactgtctacttgcctcctgtcccagtatctaaggttgtaagcacggatgaatatgttgcacgcacaaacatatattatcatgcaggaacatccagactacttgcagttggacatccctattttcctattaaaaaacctaacaataacaaaatattagttcctaaagtatcaggattacaatacagggtatttagaatacatttacctgaccccaataagtttggttttcctgacacctcattttataatccagatacacagcggctggtttgggcctgtgtaggtgttgaggtaggtcgtggtcagccattaggtgtgggcattagtggccatcctttattaaataaattggatgacacagaaaatgctagtgcttatgcagcaaatgcaggtgtggataatagagaatgtatatctatggattacaaacaaacacaattgtgtttaattggttgcaaaccacctataggggaacactggggcaaaggatccccatgtaccaatgttgcagtaaatccaggtgattgtccaccattagagttaataaacacagttattcaggatggtgatatggttgatactggctttggtgctatggactttactacattacaggctaacaaaagtgaagttccactggatatttgtacatctatttgcaaatatccagattatattaaaatggtgtcagaaccatatggcgacagcttatttttttatttacgaagggaacaaatgtttgttagacatttatttaatagggctggtactgttggtgaaaatgtaccagacgatttatacattaaaggctctgggtctactgcaaatttagccagttcaaattattttcctacacctagtggttctatggttacctctgatgcccaaatattcaataaaccttattggttacaacgagcacagggccacaataatggcatttgttggggtaaccaactatttgttactgttgttgatactacacgcagtacaaatatgtcattatgtgctgccatatctacttcagaaactacatataaaaatactaactttaaggagtacctacgacatggggaggaatatgatttacagtttatttttcaactgtgcaaaataaccttaactgcagacgttatgacatacatacattctatgaattccactattttggaggactggaattttggtctacaacctcccccaggaggcacactagaagatacttataggtttgtaacatcccaggcaattgcttgtcaaaaacatacacctccagcacctaaagaagatccccttaaaaaatacactttttgggaagtaaatttaaaggaaaagttttctgcagacctagatcagtttcctttaggacgcaaatttttactacaagcaggattgaaggccaaaccaaaatttacattaggaaaacgaaaagctacacccaccacctcatctacctctacaactgctaaacgcaaaaaacgtaagctgtaagtattgtatgtatgttgaattagtgttgtttgttgtgtatatgtttgtatgtgcttgtatgtgcttgtaaatattaagttgtatgtgtgtttgtatgtatggtataataaacacgtgtgtatgtgtttttaaatgcttgtgtaactattgtgtcatgcaacataaataaacttattgtttcaacacctactaattgtgttgtggttattcattgtatataaactatatttgctacatcctgtttttgttttatatatactatattttgtagcgccagcggccattttgtagcttcaaccgaattcggttgcatgctttttggcacaaaatgtgtttttttaaatagttctatgtcagcaactatggtttaaacttgtacgtttcctgcttgccatgcgtgccaaatccctgttttcctgacctgcactgcttgccaaccattccattgttttttacactgcactatgtgcaactactgaatcactatgtacattgtgtcatataaaataaatcactatgcgccaacgccttacataccgctgttaggcacatatttttggcttgttttaactaacctaattgcatatttggcataaggtttaaacttctaaggccaactaaatgtcaccctagttcatacatgaactgtgtaaaggttagtcatacattgttcatttgtaaaactgcacatgggtgtgtgcaaaccgttttgggttacacatttacaagcaacttatataataatactaaactacaataattcatgtataaaactaagggcgtaaccgaaatcggttgaaccgaaaccggttagtataaaagcagacattttatgcaccaaaagagaactgcaatgtttcaggacccacaggagcgacccagaaagttaccacagttatgcacagagctgcaaacaactatacatgatataatattagaatgtgtgtactgcaagcaacagttactgcgacgtgaggtatatgactttgcttttcgggatttatgcatagtatatagagatgggaatccatatgctgtatgtgataaatgtttaaagttttattctaaaattagtgagtatagacattattgttatagtttgtatggaacaacattagaacagcaatacaacaaaccgttgtgtgatttgttaattaggtgtattaactgtcaaaagccactgtgtcctgaagaaaagcaaagacatctggacaaaaagcaaagattccataatataaggggtcggtggaccggtcgatgtatgtcttgttgcagatcatcaagaacacgtagagaaacccagctgtaatcatgcatggagatacacctacattgcatgaatatatgttagatttgcaaccagagacaactgatctctactgttatgagcaattaaatgacagctcagaggaggaggatgaaatagatggtccagctggacaagcagaaccggacagagcccattacaatattgtaaccttttgttgcaagtgtgactctacgcttcggttgtgcgtacaaagcacacacgtagacattcgtactttggaagacctgttaatgggcacactaggaattgtgtgccccatctgttctcagaaaccataatctacc

SEQ ID NO: 74 - DNA, 7906 bp, Homo sapiens
  source 1..7906: mol_type = genomic DNA; note = UNCseq2426
atggctgatcctgcaggtaccaatggggaagagggtacgggatgtaatggatggttttatgtagaggctgtagtggaaaaaaaaacaggggatgctatatcagatgacgagaacgaaaatgacagtgatacaggtgaagatttggtagattttatagtaaatgataatgattatttaacacaggcagaaacagagacagcacatgcgttgtttactgcacaggaagcaaaacaacatagagatgcagtacaggttctaaaacgaaagtatttgggtagtccacttagtgatattagtggatgtgtagacaataatattagtcctagattaaaagctatatgtatagaaaaacaaagtagagctgcaaaaaggagattatttgaaagcgaagacagcgggtatggcaatactgaagtggaaactcagcagatgttacaggtagaagggcgccatgagactgaaacaccatgtagtcagtatagtggtggaagtgggggtggttgcagtcagtacagtagtggaagtgggggagagggtgttagtgaaagacacactatatgccaaacaccacttacaaatattttaaatgtactaaaaactagtaatgcaaaggcagcaatgttagcaaaatttaaagagttatacggggtgagtttttcagaattagtaagaccatttaaaagtaataaatcaacgtgttgcgattggtgtattgctgcattcggacttacacccagtatagctgacagtataaaaacactattacaacaatattgtttatatttacacattcaaagtttagcatgttcatggggaatggttgtgttactattagtaagatataaatgtggaaaaaatagagaaacaattgaaaaattgctgtctaaactattatgtgtgtctccaatgtgtatgatgatagagcctccaaaattgcgtagtacagcagcagcattatattggtataaaacaggtatatcaaatattagtgaagtgtatggagacacgccagaatggatacaaagacaaacagtattacaacatagttttaatgattgtacatttgaattatcacagatggtacaatgggcctacgataatgacatagtagacgatagtgaaattgcatataaatatgcacaattggcagacactaatagtaatgcaagtgcctttctaaaaagtaattcacaggcaaaaattgtaaaggattgtgcaacaatgtgtagacattataaacgagcagaaaaaaaacaaatgagtatgagtcaatggataaaatatagatgtgatagggtagatgatggaggtgattggaagcaaattgttatgtttttaaggtatcaaggtgtagagtttatgtcatttttaactgcattaaaaagatttttgcaaggcatacctaaaaaaaattgcatattactatatggtgcagctaacacaggtaaatcattatttggtatgagtttaatgaaatttctgcaagggtctgtaatatgttttgtaaattctaaaagccatttttggttacaaccattagcagatgccaaaataggtatgttagatgatgctacagtgccctgttggaactacatagatgacaatttaagaaatgcattggatggaaatttagtttctatggatgtaaagcatagaccattggtacaactaaaatgccctccattattaattacatctaacattaatgctggtacagattctaggtggccttatttacataatagattggtggtgtttacatttcctaatgagtttccatttgacgaaaacggaaatccagtgtatgagcttaatgataagaactggaaatcctttttctcaaggacgtggtccagattaagtttgcacgaggacgaggacaaggaaaacgatggagactctttgccaacgtttaaatgtgtgtcaggacaaaatactaacacattatgaaaatgatagtacagacctacgtgaccatatagactattggaaacacatgcgcctagaatgtgctatttattacaaggccagagaaatgggatttaaacatattaaccaccaggtggtgccaacactggctgtatcaaagaataaagcattacaagcaattgaactgcaactaacgttagaaacaatatataactcacaatatagtaatgaaaagtggacattacaagacgttagccttgaagtgtatttaactgcaccaacaggatgtataaaaaaacatggatatacagtggaagtgcagtttgatggagacatatgcaatacaatgcattatacaaactggacacatatatatatttgtgaagaagcatcagtaactgtggtagagggacaagttgactattatggtttatattatgttcatgaaggaatacgaacatattttgtgcagtttaaagatgatgcagaaaaatatagtaaaaataaagtatgggaagttcatgcgggtggtcaggtaatattatgtcctacatctgtgtttagcagcaacgaagtatcctctcctgaaattattaggcagcacttggccaaccaccccgccgcgacccataccaaagccgtcgccttgggcaccgaagaaacacagacgactatccagcgaccaagatcagagccagacaccggaaacccctgccacaccactaagttgttgcacagagactcagtggacagtgctccaatcctcactgcatttaacagcgcacacaaaggacggattaactgtaatagtaacactacacccatagtacatttaaaaggtgatgctaatactttaaaatgtttaagatatagatttaaaaagcattgtacattgtatactgcagtgtcgtctacatggcattggacaggacataatgtaaaacataaaagtgcaattgttacacttacatatgatagtgaatggcaacgtgaccaatttttgtctcaagttaaaataccaaaaactattacagtgtctactggatttatgtctatatgacaaatcttgatactgcatccacaacattactggcgtgctttttgctttgcttttgtgtgcttttgtgtgtctgcctattaatacgtccgctgcttttgtctgtgtctacatacacatcattaataatattggtattactattgtggataacagcagcctctgcgtttaggtgttttattgtatatattatatttgtttatataccattatttttaatacatacacatgcacgctttttaattacataatgtatatgtacataatgtaattgttacatataattgttgtataccataacttactattttttcttttttattttcatatataatttttttttgtgtttgtttgtttgttttttaataaactgttattacttaacaatgcgacacaaacgttctgcaaaacgcacaaaacgtgcatcggctacccaactttataaaacatgcaaacaggcaggtacatgtccacctgacattatacctaaggttgaaggcaaaactattgctgatcaaatattacaatatggaagtatgggtgtattttttggtgggttaggaattggcacagggtcgggtacaggcggacgcactgggtatattccattgggaacaaggcctcccacagctacagatacacttgctcctgtaagaccccctttaacagtagatcctgtgggcccttctgatccttctatagtttctttagtggaagaaactagttttattgatgctggtgcaccaacatctgtaccttccattcccccagatgtatcaggatttagtattactacttcaactgataccacacctgctatattagatattaataatactgttactactgttactacacataataatcccactttcactgacccatctgtattgcagcctccaacacctgcagaaactggagggcattttacactttcatcatccactattagtacacataattatgaagaaattcctatggatacatttattgttagcacaaaccctaacacagtaactagtagcacacccataccagggtctcgcccagtggcacgcctaggattatatagtcgcacaacacaacaagttaaagttgtagaccctgcttttgtaaccactcccactaaacttattacatatgataatcctgcatatgaaggtatagatgtggataatacattatatttttctagtaatgataatagtattaatatagctccagatcctgactttttggatatagttgctttacataggccagcattaacctctaggcgtactggcattaggtacagtagaattggtaataaacaaacactacgtactcgtagtggaaaatctataggtgctaaggtacattattattatgatttcagtactattgatcctgcagaagaaatagaattacaaactataacaccttctacatatactaccacttcacatgcagcctcacctacttctattaataatggattatatgatatttatgcagatgactttattacagatacttctacaaccccggtaccatctgtaccctctacatctttatcaggttatattcctgcaaatacaacaattccttttggtggtgcatacaatattcctttagtatcaggtcctgatatacccattaatataactgaccaagctccttcattaattcctatagttccagggtctccacaatatacaattattgctgatgcaggtgacttttatttacatcctagttattacatgttacgaaaacgacgtaaacgtttaccatattttttttcagatgtctctttggctgcctagtgaggccactgtctacttgcctcctgtcccagtatctaaggttgtaagcacggatgaatatgttgcacgcacaaacatatattatcatgcaggaacatccagactacttgcagttggacatccctattttcctattaaaaaacctaacaataacaaaatattagttcctaaagtatcaggattacaatacagggtatttagaatacatttacctgaccccaataagtttggttttcctgacacctcattttataatccagatacacagcggctggtttgggcctgtgtaggtgttgaggtaggtcgtggtcagccattaggtgtgggcattagtggccatcctttattaaataaattggatgacacagaaaatgctagtgcttatgcagcaaatgcaggtgtggataatagagaatgtatatctatggattacaaacaaacacaattgtgtttaattggttgcaaaccacctataggggaacactggggcaaaggatccccatgtaccaatgttgcagtaaatccaggtgattgtccaccattagagttaataaacacagttattcaggatggtgatatggttgatactggctttggtgctatggactttactacattacaggctaacaaaagtgaagttccactggatatttgtacatctatttgcaaatatccagattatattaaaatggtgtcagaaccatatggcgacagcttatttttttatttacgaagggaacaaatgtttgttagacatttatttaatagggctggtactgttggtgaaaatgtaccagacgatttatacattaaaggctctgggtctactgcaaatttagccagttcaaattattttcctacacctagtggttctatggttacctctgatgcccaaatattcaataaaccttattggttacaacgagcacagggccacaataatggcatttgttggggtaaccaactatttgttactgttgttgatactacacgcagtacaaatatgtcattatgtgctgccatatctacttcagaaactacatataaaaatactaactttaaggagtacctacgacatggggaggaatatgatttacagtttatttttcaactgtgcaaaataaccttaactgcagacgttatgacatacatacattctatgaattccactattttggaggactggaattttggtctacaacctcccccaggaggcacactagaagatacttataggtttgtaacatcccaggcaattgcttgtcaaaaacatacacctccagcacctaaagaagatccccttaaaaaatacactttttgggaagtaaatttaaaggaaaagttttctgcagacctagatcagtttcctttaggacgcaaatttttactacaagcaggattgaaggccaaaccaaaatttacattaggaaaacgaaaagctacacccaccacctcatctacctctacaactgctaaacgcaaaaaacgtaagctgtaagtattgtatgtatgttgaattagtgttgtttgttgtgtatatgtttgtatgtgcttgtatgtgcttgtaaatattaagttgtatgtgtgtttgtatgtatggtataataaacacgtgtgtatgtgtttttaaatgcttgtgtaactattgtgtcatgcaacataaataaacttattgtttcaacacctactaattgtgttgtggttattcattgtatataaactatatttgctacatcctgtttttgttttatatatactatattttgtagcgccagcggccattttgtagcttcaaccgaattcggttgcatgctttttggcacaaaatgtgtttttttaaatagttctatgtcagcaactatggtttaaacttgtacgtttcctgcttgccatgcgtgccaaatccctgttttcctgacctgcactgcttgccaaccattccattgttttttacactgcactatgtgcaactactgaatcactatgtacattgtgtcatataaaataaatcactatgcgccaacgccttacataccgctgttaggcacatatttttggcttgttttaactaacctaattgcatatttggcataaggtttaaacttctaaggccaactaaatgtcaccctagttcatacatgaactgtgtaaaggttagtcatacattgttcatttgtaaaactgcacatgggtgtgtgcaaaccgttttgggttacacatttacaagcaacttatataataatactaaactacaataattcatgtataaaactaagggcgtaaccgaaatcggttgaaccgaaaccggttagtataaaagcagacattttatgcaccaaaagagaactgcaatgtttcaggacccacaggagcgacccagaaagttaccacagttatgcacagagctgcaaacaactatacatgatataatattagaatgtgtgtactgcaagcaacagttactgcgacgtgaggtatatgactttgcttttcgggatttatgcatagtatatagagatgggaatccatatgctgtatgtgataaatgtttaaagttttattctaaaattagtgagtatagacattattgttatagtttgtatggaacaacattagaacagcaatacaacaaaccgttgtgtgatttgttaattaggtgtattaactgtcaaaagccactgtgtcctgaagaaaagcaaagacatctggacaaaaagcaaagattccataatataaggggtcggtggaccggtcgatgtatgtcttgttgcagatcatcaagaacacgtagagaaacccagctgtaatcatgcatggagatacacctacattgcatgaatatatgttagatttgcaaccagagacaactgatctctactgttatgagcaattaaatgacagctcagaggaggaggatgaaatagatggtccagctggacaagcagaaccggacagagcccattacaatattgtaaccttttgttgcaagtgtgactctacgcttcggttgtgcgtacaaagcacacacgtagacattcgtactttggaagacctgttaatgggcacactaggaattgtgtgccccatctgttctcagaaaccataatctacc

SEQ ID NO: 75 - DNA, 7906 bp, Homo sapiens
  source 1..7906: mol_type = genomic DNA; note = UNCseq2427
atggctgatcctgcaggtaccaatggggaagagggtacgggatgtaatggatggttttatgtagaggctgtagtggaaaaaaaaacaggggatgctatatcagatgacgagaacgaaaatgacagtgatacaggtgaagatttggtagattttatagtaaatgataatgattatttaacacaggcagacacagagacagcacatgcgttgtttactgcacaggaagcaaaacaacatagagatgcagtacaggttctaaaacgaaagtatttgggtagtccacttagtgatattagtggatgtgtagacaataatattagtcctagattaaaagctatatgtatagaaaaacaaagtagagctgcaaaaaggagattatttgaaagcgaagacagcgggtatggcaatactgaagtggaaactcagcagatgttacaggtagaagggcgccatgagactgaaacaccatgtagtcagtatagtggtggaagtgggggtggttgcagtcagtacagtagtggaagtgggggagagggtgttagtgaaagacacactatatgccaaacaccacttacaaatattttaaatgtactaaaaactagtaatgcaaaggcagcaatgttagcaaaatttaaagagttatacggggtgagtttttcagaattagtaagaccatttaaaagtaataaatcaacgtgttgcgattggtgtattgctgcatttggacttacacccagtatagctgacagtataaaaacactattacaacaatattgtttatatttacacattcaaagtttagcatgttcatggggaatggttgtgttactattagtaagatataaatgtggaaaaaatagagaaacaattgaaaaattgctgtctaaactattatgtgtgtctccaatgtgtatgatgatagagcctccaaaattgcgtagtacagcagcagcattatattggtataaaacaggtatatcaaatattagtgaagtgtatggagacacgccagaatggatacaaagacaaacagtattacaacatagttttaatgattgtacatttgaattatcacagatggtacaatgggcctacgataatgacatagtagacgatagtgaaattgcatataaatatgcacaattggcagacactaatagtaatgcaagtgcctttctaaaaagtaattcacaggcaaaaattgtaaaggattgtgcaacaatgtgtagacattataaacgagcagaaaaaaaacaaatgagtatgagtcaatggataaaatatagatgtgatagggtagatgatggaggtgattggaagcaaattgttatgtttttaaggtatcaaggtgtagagtttatgtcatttttaactgcattaaaaagatttttgcaaggcatacctaaaaaaaattgcatattactatatggtgcagctaacacaggtaaatcattatttggtatgagtttaatgaaatttctgcaagggtctgtaatatgttttgtaaattctaaaagccatttttggttacaaccattagcagatgccaaaataggtatgttagatgatgctacagtgccctgttggaactacatagatgacaatttaagaaatgcattggatggaaatttagtttctatggatgtaaagcatagaccattggtacaactaaaatgccctccattattaattacatctaacattaatgctggtacagattctaggtggccttatttacataatagattggtggtgtttacatttcctaatgagtttccatttgacgaaaacggaaatccagtgtatgagcttaatgataagaactggaaatcctttttctcaaggacgtggtccagattaagtttgcacgaggacgaggacaaggaaaacgatggagactctttgccaacgtttaaatgtgtgtcaggacaaaatactaacacattatgaaaatgatagtacagacctacgtgaccatatagactattggaaacacatgcgcctagaatgtgctatttattacaaggccagagaaatgggatttaaacatattaaccaccaggtggtgccaacactggctgtatcaaagaataaagcattacaagcaattgaactgcaactaacgttagaaacaatatataactcacaatatagtaatgaaaagtggacattacaagacgttagccttgaagtgtatttaactgcaccaacaggatgtataaaaaaacatggatatacagtggaagtgcagtttgatggagacatatgcaatacaatgcattatacaaactggacacatatatatatttgtgaagaagcatcagtaactgtggtagagggtcaagttgactattatggtttatattatgttcatgaaggaatacgaacatattttgtgcagtttaaagatgatgcagaaaaatatagtaaaaataaagtatgggaagttcatgcgggtggtcaggtaatattatgtcctacatctgtgtttagcagcaacgaagtatcctctcctgaaattattaggcagcacttggccaaccactccgccgcgacccataccaaagccgtcgccttgggcaccgaagaaacacagacgactatccagcgaccaagatcagagccagacaccggaaacccctgccacaccactaagttgttgcacagagactcagtggacagtgctccaatcctcactgcatttaacagctcacacaaaggacggattaactgtaatagtaacactacacccatagtacatttaaaaggtgatgctaatactttaaaatgtttaagatatagatttaaaaagcattgtacattgtatactgcagtgtcgtctacatggcattggacaggacataatgtaaaacataaaagtgcaattgttacacttacatatgatagtgaatggcaacgtgaccaatttttgtctcaagttaaaataccaaaaactattacagtgtctactggatttatgtctatatgacaaattttgatactgcatccacaacattactggcgtgctttttgctttgcttttgtgtgcttttgtgtgtctgcctattaatacgtccgctgcttttgtctgtgtctacatacacatcattaatactattggtattactattgtggataacagcagcctctgcgtttaggtgttttattgtatatattgtatttgtttatataccattatttttaatacatacacatgcacgctttttaattacataatgtatatgtacataatgtaattgttacatataattgttgtataccataacttactattttttcttttttattttcatatataatttttttttttgtttgtttgtttgttttttaataaactgttattacttaacaatgcgacacaaacgttctgcaaaacgcacaaaacgtgcatcggctacccaactttataaaacatgcaaacaggcaggtacatgtccacctgacattatacctaaggttgaaggcaaaactattgctgatcaaatattacaatatggaagtatgggtgtattttttggtgggttaggaattggaacagggtcgggtacaggcggacgcactgggtatattccattgggaacaaggcctcccacagctacagatacacttgctcctgtaagaccccctttaacagtagatcctgtgggcccttctgatccttctatagtttctttagtggaagaaactagttttattgatgctggtgcaccaacatctgtaccttccattcccccagatgtatcaggatttagtattactacttcaactgataccacacctgctatattagatattaataatactgttactactgttactacacataataatcccactttcactgacccatctgtattgcagcctccaacacctgcagaaactggagggcattttacactttcatcatccactattagtacacataattatgaagaaattcctatggatacatttattgttagcacaaaccctaacacagtaactagtagcacacccataccagggtctcgcccagtggcacgcctaggattatatagtcgcacaacacaacaagttaaagttgtagaccctgcttttgtaaccactcccactaaacttattacatatgataatcctgcatatgaaggtatagatgtggataatacattatatttttctagtaatgataatagtattaatatagctccagatcctgactttttggatatagttgctttacataggccagcattaacctctaggcgtactggcattaggtacagtagaattggtaataaacaaacactacgtactcgtagtggaaaatctataggtgctaaggtacattattattatgattttagtactattgatcctgcagaagaaatagaattacaaactataacaccttctacatatactaccacttcacatgcagcctcacctacttctattaataatggattatatgatatttatgcagatgactttattacagatacttctacaaccccggtaccatctgtaccctctacatctttatcaggttatattcctgcaaatacaacaattccttttggtggtgcatacaatattcctttagtatcaggtcctgatatacccattaatataactgaccaagctccttcattaattcctatagttccagggtctccacaatatacaattattgctgatgcaggtgacttttatttacatcctagttattacatgttacgaaaacgacgtaaacgtttaccatattttttttcagatgtctctttggctgcctagtgaggccactgtctacttgcctcctgtcccagtatctaaggttgtaagcacggatgaatatgttgcacgcacaaacatatattatcatgcaggaacatccagactacttgcagttggacatccctattttcctattaaaaaacctaacaataacaaaatattagttcctaaagtatcaggattacaatacagggtatttagaatacatttacctgaccccaataagtttggttttcctgacacctcattttataatccagatacacagcggctggtttgggcctgtgtaggtgttgaggtaggtcgtggtcagccattaggtgtgggcattagtggccatcctttattaaataaattggatgacacagaaaatgctagtgcttatgcagcaaatgcaggtgtggataatagagaatgtatatctatggattacaaacaaacacaattgtgtttaattggttgcaaaccacctataggggaacactggggcaaaggatccccatgtaccaatgttgcagtaaatccaggtgattgtccaccattagagttaataaacacagttattcaggatggtgatatggttgatactggctttggtgctatggactttactacattacaggctaacaaaagtgaagttccactggatatttgtacatctatttgcaaatatccagattatattaaaatggtgtcagaaccatatggcgacagcttatttttttatttacgaagggaacaaatgtttgttagacatttatttaatagggctggtgctgttggtgaaaatgtaccagacgatttatacattaaaggctctgggtctactgcaaatttagccagttcaaattattttcctacacctagtggttctatggttacctctgatgcccaaatattcaataaaccttattggttacaacgagcacagggccacaataatggcatttgttggggtaaccaactatttgttactgttgttgatactacacgcagtacaaatatgtcattatgtgctgccatatctacttcagaaactacatataaaaatactaactttaaggagtacctacgacatggggaggaatatgatttacagtttatttttcaactgtgcaaaataaccttaactgcagacgttatgacatacatacattctatgaattccactattttggaggactggaattttggtctacaacctcccccaggaggcacactagaagatacttataggtttgtaacatcccaggcaattgcttgtcaaaaacatacacctccagcacctaaagaagatccccttaaaaaatacactttttgggaagtaaatttaaaggaaaagttttctgcagacctagatcagtttcctttaggacgcaaatttttactacaagcaggattgaaggccaaaccaaaatttacattaggaaaacgaaaagctacacccaccacctcatctacctctacaactgctaaacgcaaaaaacgtaagctgtaagtattgtatgtatgttgaattagtgttgtttgttgtttatatgtttgtatgtgcttgtatgtgcttgtaaatattaagttgtatgtgtgtttgtatgtatggtataataaacacgtgtgtatgtgtttttaaatgcttgtgtaactattgtgtcatgcaacataaataaacttattgtttcaacacctactaattgtgttgtggttattcattgtatataaactatatttgctacatcctgtttttgttttatatatactatattttgtagcgccagcggccattttgtagctccaaccgaattcggttgcatgctttttggcacaaaatgtgtttttttaaatagttctatgtcagcaactatagtttaaacttgtacgtttcctgcttgccatgcgtgccaaatccctgttttcctgacctgcactgcttgccaaccattccattgttttttacactgcactatgtgcaactactgaatcactatgtacattgtgtcatataaaataaatcactatgcgccaacgccttacataccgctgttaggcacatatttttggcttgttttaactaacctaattgcatatttggcataaggtttaaacttctaaggccaactaaatgtcaccctagttcatacatgaactgtgtaaaggttagtcatacattgttcatttgtaaaactgcacatgggtgtgtgcaaaccgttttgggttacacatttacaagcaacttatataataatactaaactacaataattcatgtataaaactaagggcgtaaccgaaatcggttgaaccgaaaccggttagtataaaagcagacattttatgcaccaaaagagaactgcaatgtttcaggacccacaggagcgacccagaaagttaccacagttatgcacagagctgcaaacaactatacatgatataatattagaatgtgtgtactgcaagcaacagttactgcgacgtgaggtatatgactttgcttttcgggatttatgcatagtatatagagatgggaatccatatgctgtatgtgataaatgtttaaagttttattctaaaattagtgagtatagacattattgttatagtgtgtatggaacaacattagaacagcaatacaacaaaccgttgtgtgatttgttaattaggtgtattaactgtcaaaagccactgtgtcctgaagaaaagcaaagacatctggacaaaaagcaaagattccataatataaggggtcggtggaccggtcgatgtatgtcttgttgcagatcatcaagaacacgtagagaaacccagctgtaatcatgcatggagatacacctacattgcatgaatatatgttagatttgcaaccagagacaactgatctctactgttatgagcaattaaatgacagctcagaggaggaggatgaaatagatggtccagctggacaagcagaaccggacagagcccattacaatattgtaaccttttgttgcaagtgtgactctacgcttcggttgtgcgtacaaagcacacacgtagacattcgtactttggaagacctgttaatgggcacactaggaattgtgtgccccatctgttctcagaaaccataatctacc

SEQ ID NO: 76 - DNA, 7906 bp, Homo sapiens
  source 1..7906: mol_type = genomic DNA; note = UNCseq2430
atggctgatcctgcaggtaccaatggggaagagggtacgggatgtaatggatggttttatgtagaggctgtagtggaaaaaaaaacaggggatgctatatcagatgacgagaacgaaaatgacagtgatacaggtgaagatttggtagattttatagtaaatgataatgattatttaacacaggcagaaacagagacagcacatgcgttgtttactgcacaggaagcaaaacaacatagagatgcagtacaggttctaaaacgaaagtatttgggtagtccacttagtgatattagtgaatgtgtagacaataatattagtcctagattaaaagctatatgtatagaaaaacaaagtacagctgcaaaaaggagattatttgaaagcgaagacagcgggtatggcaatactgaagtggaaactcagcagatgttacaggtagaagggcgccatgagactgaaacaccatgtagtcagtatagtggtggaagtgggggtggttgcagtcagtacagtagtggaagtgggggagagggtgttagtgaaagacacactacatgccaaacaccacttacaaatattttaaatgtactaaaaactagtaatgcaaaggcagcaatgttagcaaaatttaaagagttatacggggtaagtttttcagaattagtaagaccatttaaaagtaataaatcaacgtgttgcgattggtgtattgctgcatttggacttacacccagtatagctgacagtataaaaacactattacaacaatattgtttatatttacacattcaaagtttagcatgttcatggggaatggttgtgttactattagtaagatataaatgtggaaaaaatagagaaacaattgaaaaattgctgtctaaactattatgtgtgtctccaatgtgtatgatgatagagcctccaaaattgcgtagtacagcagcagcattatattggtataaaacaggtatatcaaatattagtgaagtgtatggagacacgccagaatggatacaaagacaaacagtattacaacatagttttaatgattgtacatttgaattatcacagatggtacaatgggcctacgataatgacatagtagacgatagtgaaattgcatataaatatgcacaattggcagacactaatagtaatgcaagtgcctttctaaaaagtaattcacaggcaaaaattgtaaaggattgtgcaacaatgtgtagacattataaacgagcagaaaaaaaacaaatgagtatgagtcaatggataaaatatagatgtgatagggtagatgatggaggtgattggaagcaaattgttatgtttttaaggtatcaaggtgtagagtttatgtcatttttaactgcattaaaaagatttttgcaaggcatacctaaaaaaaattgcatattactatatggtgcagctaacacaggtaaatcattatttggtatgagtttaatgaaatttctgcaagggtctgtaatatgttttgtaaattctaaaagccatttttggttacaaccattagcagatgccaaaataggtatgttagatgatgctacagtgccctgttggaactacatagatgacaatttaagaaatgcattggatggaaatttagtttctatggatgtaaagcatagaccattggtacaactaaaatgccctccattattaattacatctaacattaatgctggtacagattctaggtggccttatttacataatagattggtggtgtttacatttcctaatgagtttccatttgacgaaaacggaaatccagtgtatgagcttaatgataagaactggaaatcctttttctcaaggacgtggtccagattaagtttgcacgaggacgaggacaaggaaaacgatggagactctttgccaacgtttaaatgtgtgtcaggacaaaatactaacacattatgaaaatgatagtacagacctacgtgaccatatagactattggaaacacatgcgcctagaatgtgctatttattacaaggccagagaaatgggatttaaacatattaaccaccaggtggtgccaacactggctgtatcaaagaataaagcattacaagcaattgaactgcaactaacgttagaaacaatatataactcacaatatagtaatgaaaagtggacattacaagacgttagccttgaagtgtatttaactgcaccaacaggatgtataaaaaaacatggatatacagtggaagtgcagtttgatggagacatatgcaatacaatgcattatacaaactggacacatatatatatttgtgaagaagcatcagtaactgtggtagagggtcaagttgactattatggtttatattatgttcatgaaggaatacgaacatattttgtgcagtttaaagatgatgcagaaaaatatagtaaaaataaagtatgggaagttcatgcgggtggtcaggtaatattatgtcctacatctgtgtttagcagcaacgaagtatcctctcctgaaattattaggcagcacttggccaaccactccgccgcgacccataccaaagccgtcgccttgggcaccgaagaaacacagacgactatccagcgaccaagatcagagccagacaccggaaacccctgccacaccactaagttgttgcacagagactcagtggacagtgctccaatcctcactgcatttaacagctcacacaaaggacggattaactgtaatagtaacactacacccatagtacatttaaaaggtgatgctaatactttaaaatgtttaagatatagatttaaaaagcattgtacattgtatactgcagtgtcgtctacatggcattggacaggacataatgtaaaacataaaagtgcaattgttacacttacatatgatagtgaatggcaacgtgaccaatttttgtctcaagttaaaataccaaaaactattacagtgtctactggatttatgtccatatgacaaatcttgatactgcatccacaacattactggcgtgctttttgctttgcttttgtgtgcttttgtgtgtctgcctattaatacgtccgctgcttttgtctgtgtctacatacacatcattaataatattggtattactattgtggataacagcagcctctgcgtttaggtgttttattgtatatattgtatttgtttatataccattatttttaatacatacacatgcacgctttttaattacataatgtatatgtacataatgtaattgttacatataattgttgtataccataccttactattttttcttttttattttcatatataatttttttttttgtttgtttgtttgttttttaataaactgttatcacttaacaatgcgacacaaacgttctgcaaaacgcacaaaacgtgcatcggctacccaactttataaaacatgcaaacaggcaggtacatgtccacctgacattatacctaaggttgaaggcaaaactattgctgatcaaatattacaatatggaagtatgggtgtattttttggtgggttaggaattggaacagggtcgggtacaggcggacgcactgggtatattccattgggaacaaggcctcccacagctacagatacacttgctcctgtaagaccccctttaacagtagatcctgtgggcccttctgatccttctatagtttctttagtggaagaaactagttttattgatgctggtgcaccaacatctgtaccttccattcccccagatgtatcaggatttagtattactacttcaactgataccacacctgctatattagatattaataatactgttactactgttactacacataataatcccactttcactgacccatctgtattgcagcctccaacacctgcagaaactggagggcattttacactttcatcatccactattagtacacataattatgaagaaattcctatggatacatttattgttagcacaaaccctaacacagtaactagtagcacacccataccagggtctcgcccagtggcacgcctaggattatatagtcgcacaacacaacaggttaaagttgtagaccctgcttttgtaaccactcccactaaacttattacatatgataatcctgcatatgaaggtatagatgtggataatacattatatttttctagtaatgataatagtattaatatagctccagatcctgactttttggatatagttgctttacataggccagcattaacctctaggcgtactggcattaggtacagtagaattggtaataaacaaacactacgtactcgtagtggaaaatctataggtgctaaggtacattattattatgatttcagtactattgatcctgcagaagaaatagaattacaaactataacaccttctacatatactaccacttcacatgcagcctcacctacttctattaataatggattatatgatatttatgcagatgactttattacagatacttctacaaccccggtaccatctgtaccctctacatctttatcaggttatattcctgcaaatacaacaattccttttggtggtgcatacaatattcctttagtatcaggtcctgatatacccattaatataactgaccaagctccttcattaattcctatagttccagggtctccacaatatacaattattgctgatgcaggtgacttttatttacatcctagttattacatgttacgaaaacgacgtaaacgtttaccatattttttttcagatgtctctttggctgcctagtgaggccactgtctacttgcctcctgtcccagtatctaaggttgtaagcacggatgaatatgttgcacgcacaaacatatattatcatgcaggaacatccagactacttgcagttggacatccctattttcctattaaaaaacctaacaataacaaaatattagttcctaaagtatcaggattacaatacagggtatttagaatacatttacctgaccccaataagtttggttttcctgacacctcattttataatccagatacacagcggctggtttgggcctgtgtaggtgttgaggtaggtcgtggtcagccattaggtgtgggcattagtggccatcctttattaaataaattggatgacacagaaaatgctagtgcttatgcagcaaatgcaggtgtggataatagagaatgtatatctatggattacaaacaaacacaattgtgtttaattggttgcaaaccacctataggggaacactggggcaaaggatccccatgtaccaatgttgcagtaaatccaggtgattgtccaccattagagttaataaacacagttattcaggatggtgatatggttgatactggctttggtgctatggactttactacattacaggctaacaaaagtgaagttccactggatatttgtacatctatttgcaaatatccagattatattaaaatggtgtcagaaccatatggcgacagcttatttttttatttacgaagggaacaaatgtttgttagacatttatttaatagggctggtactgttggtgaaaatgtaccagacgatttatacattaaaggctctgggtctactgcaaatttagccagttcaaattattttcctacacctagtggttctatggttacctctgatgcccaaatattcaataaaccttattggttacaacgagcacagggccacaataatggcatttgttggggtaaccaactatttgttactgttgttgatactacacgcagtacaaatatgtccttatgtgctgccatatctacttcagaaactacatataaaaatactaactttaaggagtacctacgacatggggaggaatatgatttacagtttatttttcaactgtgcaaaataaccttaactgcagacgttatgacatacatacattctatgaattccactattttggaggactggaattttggtctacaacctcccccaggaggcacactagaagatacttataggtttgtaacatcccaggcaattgcttgtcaaaaacatacacctccagcacctaaagaagatccccttaaaaaatacactttttgggaagtaaatttaaaggaaaagttttctgcagacctagatcagtttcctttaggacgcaaatttttactacaagcaggattgaaggccaaaccaaaatttacattaggaaaacgaaaagctacacccaccacctcatctacctctacaactgctaaacgcaaaaaacgtaagctgtaagtattgtatgtatgttgaattagtgttgtttgttgtgtatatgtttgtatgtgcttgtatgtgcttgtaaatattaagttgtatgtgtgtttgtatgtatggtataataaacacgtgtgtatgtgtttttaaatgcttgtgtaactattgtgtcatgcaacataaataaacttattgtttcaacacctactaattgtgttgtggttattcattgtatataaactatatttgctacatcctgtttttgttttatatatactatattttgtagcgccagcggccattttgtagcttcaaccgaattcggttgcatgctttttggcacaaaatgtgtttttttaaatagttctatgtcagcaactatggtttaaacttgtacgtttcctgcttgccatgcgtgccaaatccctgttttcctgacctgcactgcttgccaaccattccattgttttttacactgcactatgtgcaactactgactcactatgtacattgtgtcatataaaataaatcactatgcgccaacgccttacataccgctgttaggcacatattttgggcttgttttaactaacctaattgcatatttggcataaggtttaaacttctaaggccaactaaatgtcaccctagttcatacatgaactgtgtaaaggttagtcatacattgttcatttgtaaaactgcacatgggtgtgtgcaaaccgttttgggttacacatttacaagcaacttatataataatactaaactacaataattcatgtataaaactaagggcgtaaccgaaatcggttgaaccgaaaccggttagtataaaagcagacattttatgcaccaaaagagaactgcaatgtttcaggacccacaggagcgacccagaaagttaccacagttatgcacagagctgcaaacaactatacatgatataatattagaatgtgtgtactgcaagcaacagttactgcgacgtgaggtatatgactttgcttttcgggatttatgcatagtatatagagatgggaatccatatgctgtatgtgataaatgtttaaagttttattctaaaattagtgagtatagacattattgttatagtttgtatggaacaacattagaacagcaatacaacaaaccgttgtgtgatttgttaattaggtgtattaactgtcaaaagccactgtgtcctgaagaaaagcaaagacatctggacaaaaagcaaagattccataatataaggggtcggtggaccggtcgatgtatgtcttgttgcagatcatcaagaacacgtagagaaacccagctgtaatcatgcatggagatacacctacattgcatgaatatatgttagatttgcaaccagagacaactgatctctactgttatgagcaattaaatgacagctcagaggaggaggatgaaatagatggtccagctggacaagcagaaccggacagagcccattacaatattgtaaccttttgttgcaagtgtgactctacgcttcggttgtgcgtacaaagcacacacgtagacattcgtactttggaagacctgttaatgggcacactaggaattgtgtgccccatctgttctcagaaaccataatctacc

SEQ ID NO: 77 - DNA, 7906 bp, Homo sapiens
  source 1..7906: mol_type = genomic DNA; note = UNCseq2450
atggctgatcctgcaggtaccaatggggaagagggtacgggatgtaatggatggttttatgtagaggctgtagtggaaaaaaaaacaggggatgctatatcagatgacgagaacgaaaatgacagtgatacaggtgaagatttggtagattttatagtaaatgataatgattatttaacacaggcagaaacagagacagcacatgcgttgtttactgcacaggaagcaaaacaacatagagatgcagtacaggttctaaaacgaaagtatttgggtagtccacttagtgatattagtggatgtgtagacaataatattagtcctagattaaaagctatatgtatagaaaaacaaagtagagctgcaaaaaggagattatttgaaagcgaagacagcgggtatggcaatactgaagtggaaactcagcagatgttacaggtagaagggcgccatgagactgaaacaccatgtagtcagtatagtggtggaagtgggggtggttgcagtcagtacagtagtggaagtgggggagagggtgttagtgaaagacacactatatgccaaacaccacttacaaatattttaaatgtactaaaaactagtaatgcaaaggcagcaatgttagcaaaatttaaagagttatacggggtgagtttttcagaattagtaagaccatttaaaagtaataaatcaacgtgttgcgattggtgtattgctgcatttggacttacacccagtatagctgacagtataaaaacactattacaacaatattgtttatatttacacattcaaagtttagcatgttcatggggaatggttgtgttactattagtaagatataaatgtggaaaaaatagagaaacaattgaaaaattgctgtctaaactattatgtgtgtctccaatgtgtatgatgatagagcctccaaaattgcgtagtacagcagcagcattatattggtataaaacaggtatatcaaatattagtgaagtgtatggagacacgccagaatggatacaaagacaaacagtattacaacatagttttaatgattgtacatttgaattatcacagatggtacaatgggcctacgataatgacatagtagacgatagtgaaattgcatataaatatgcacaattggcagacactaatagtaatgcaagtgcctttctaaaaagtaattcacaggcaaaaattgtaaaggattgtgcaacaatgtgtagacattataaacgagcagaaaaaaaacaaatgagtatgagtcaatggataaaatatagatgtgatagggtagatgatggaggtgattggaagcaaattgttatgtttttaaggtatcaaggtgtagagtttatgtcatttttaactgcattaaaaagatttttgcaaggcatacctaaaaaaaattgcatattactatatggtgcagctaacacaggtaaatcattatttggtatgagtttaatgaaatttctgcaagggtctgtaatatgttttgtaaattctaaaagccatttttggttacaaccattagcagatgccaaaataggtatgttagatgatgctacagtgccctgttggaactacatagatgacaatttaagaaatgcattggatggaaatttagtttctatggatgtaaagcatagaccattggtacaactaaaatgccctccattattaattacatctaacattaatgctggtacagattctaggtggccttatttacataatagattggtggtgtttacatttcctaatgagtttccatttgacgaaaacggaaatccagtgtatgagcttaatgataagaactggaaatcctttttctcaaggacgtggtccagattaagtttgcacgaggacgaggacaaggaaaacgatggagactctttgccaacgtttaaatgtgtgtcaggacaaaatactaacacattatgaaaatgatagtacagacctacgtgaccatatagactattggaaacacatgcgcctagaatgtgctatttattacaaggccagagaaatgggatttaaacatattaaccaccaggtggtgccaacactggctgtatcaaagaataaagcattacaagcaattgaactgcaactaacgttagaaacaatatataactcacaatatagtaatgaaaagtggacattacaagacgttagccttgaagtgtatttaactgcaccaacaggatgtataaaaaaacatggatatacagtggaagtgcagtttgatggagacatatgcaatacaatgcattatacaaactggacacatatatatatttgtgaagaagcatcagtaactgtggtagagggtcaagttgactattatggtttatattatgttcatgaaggaatacgaacatattttgtgcagtttaaagatgatgcagaaaaatatagtaaaaataaagtatgggaagttcatgcgggtggtcaggtaatattatgtcctacatctgtgtttagcagcaacgaagtatcctctcctgaaattattaggcagcacttggccaaccactccgccgcgacccataccaaagccgtcgccttgggcaccgaagaaacacagacgactatccagcgaccaagatcagagccagacaccggaaacccctgccacaccactaagttgttgcacagagactcagtggacagtgctccaatcctcactgcatttaacagctcacacaaaggacggattaactgtaatagtaacactacacccatagtacatttaaaaggtgatgctaatactttaaaatgtttaagatatagatttaaaaagcattgtacattgtatactgcagtgtcgtctacatggcattggacaggacataatgtaaaacataaaagtgcaattgttacacttacatatgatagtgaatggcaacgtgaccaatttttgtctcaagttaaaataccaaaaactattacagtgtctactggatttatgtctatatgacaaatcttgatactgcatccacaacattactggcgtgctttttgctttgcttttgtgtgcttttgtgtgtctgcctattaatacgtccgctgcttttgtctgtgtctacatacacatcattaatactattggtattactattgtggataacagcagcctctgcgtttaggtgttttattgtatatattgtatttgtttatataccattatttttaatacatacacatgcacgctttttaattacataatgtatatgtacataatgtaattgttacatataattgttgtataccataacttactattttttcttttttattttcatatataatttttttttttgtttgtttgtttgttttttaataaactgttattacttaacaatgcgacacaaacgttctgcaaaacgcacaaaacgtgcatcggctacccaactttataaaacatgcaaacaggcaggtacatgtccacctgacattatacctaaggttgaaggcaaaactattgctgatcaaatattacaatatggaagtatgggtgtattttttggtgggttaggaattggaacagggtcgggtacaggcggacgcactgggtatattccattgggaacaaggcctcccacagctacagatacacttgctcctgtacgaccccctttaacagtagatcctgtgggcccttctgatccttctatagtttctttagtggaagaaactagttttattgatgctggtgcaccaacatctgtaccttccattcccccagatgtatcaggatttagtattactacttcaactgataccacacctgctatattagatattaataatactgttactactgttactacacataataatcccactttcactgacccatctgtattgcagcctccaacacctgcagaaactggagggcattttacactttcatcatccactattagtacacataattatgaagaaattcctatggatacatttattgttagcacaaaccctaacacagtaactagtagcacacccataccagggtctcgcccagtggcacgcctaggattatatagtcgcacaacacaacaggttaaagttgtagaccctgcttttgtaaccactcccactaaacttattacatatgataatcctgcatatgaaggtatagatgtggataatacattatatttttctagtaatgataatagtattaatatagctccagatcctgactttttggatatagttgctttacataggccagcattaacctctaggcgtactggcattaggtacagtagaattggtaataaacaaacactacgtactcgtagtggaaaatctataggtgctaaggtacattattattatgattttagtactattgatcctgcagaagaaatagaattacaaactataacaccttctacatatactaccacttcacatgcagcctcacctacttctattaataatggattatatgatattgatgcagatgactttattacagatacttctacaaccccggtaccatctgtaccctctacatctttatcaggttatattcctgcaaatacaacaattccttttggtggtgcatacaatattcctttagtatcaggtcctgatatacccattaatataactgaccaagctccttcattaattcctatagttccagggtctccacaatatacaattattgctgatgcaggtgacttttatttacatcctagttattacatgttacgaaaacgacgtaaacgtttaccatattttttttcagatgtctctttggctgcctagtgaggccactgtctacttgcctcctgtcccagtatctaaggttgtaagcacggatgaatatgttgcacgcacaaacatatattatcatgcaggaacatccagactacttgcagttggacatccctattttcctattaaaaaacctaacaataacaaaatattagttcctaaagtatcaggattacaatacagggtatttagaatacatttacctgaccccaataagtttggttttcctgacacctcattttataatccagatacacagcggctggtttgggcctgtgtaggtgttgaggtaggtcgtggtcagccattaggtgtgggcattagtggccatcctttattaaataaattggatgacacagaaaatgctagtgcttatgcagcaaatgcaggtgtggataatagagaatgtatatctatggattacaaacaaacacaattgtgtttaattggttgcaaaccacctataggggaacactggggcaaaggatccccatgtaccaatgttgcagtaaatccaggtgattgtccaccattagagttaataaacacagttattcaggatggtgatatggttgatactggctttggtgctatggactttactacattacaggctaacaaaagtgaagttccactggatatttgtacatctatttgcaaatatccagattatattaaaatggtgtcagaaccatatggcgacagcttatttttttatttacgaagggaacaaatgtttgttagacatttatttaatagggctggtactgttggtgaaaatgtaccagacgatttatacattaaaggctctgggtctactgcaaatttagccagttcaaattattttcctacacctagtggttctatggttacctctgatgcccaaatattcaataaaccttattggttacaacgagcacagggccacaataatggcatttgttggggtaaccaactatttgttactgttgttgatactacacgcagtacaaatatgtcattatgtgctgccatatctacttcagaaactacatataaaaatactaactttaaggagtacctacgacatggggaggaatatgatttacagtttatttttcaactgtgcaaaataaccttaactgcagacgttatgacatacatacattctatgaattccactattttggaggactggaattttggtctacaacctcccccaggaggcacactagaagatacttataggtttgtaacatcccaggcaattgcttgtcaaaaacatacacctccagcacctaaagaagatccccttaaaaaatacactttttgggaagtaaatttaaaggaaaagttttctgcagacctagatcagtttcctttaggacgcaaatttttactacaagcaggattgaaggccaaaccaaaatttacattaggaaaacgaaaagctacacccaccacctcatctacctctacaactgctaaacgcaaaaaacgtaagctgtaagtattgtatgtatgttgaattagtgttgtttgttgtgtatatgtttgtatgtgcttgtatgtgcttgtaaatattaagttgtatgtgtgtttgtatgtatggtataataaacacgtgtgtatgtgtttttaaatgcttgtgtaactattgtgtcatgcaacataaataaacttattgtttcaacacctactaattgtgttgtggttattcattgtatataaactatatttgctacatcctgtttttgttttatatatactatattttgtagcgccagcggccattttgtagctccaaccgaattcggttgcatgctttttggcacaaaatgtgtttttttaaatagttctatgtcagcaactatggtttaaacttgtacgtttcctgcttgccatgcgtgccaaatccctgttttcctgacctgcactgcttgccaaccattccattgttttttacactgcactatgtgcaactactgaatcactatgtacattgtgtcatataaaataaatcactatgcgccaacgccttacataccgctgttaggcacatatttttggcttgttttaactaacctaattgcatatttggcataaggtttaaacttctaaggccaactaaatgtcaccctagttcatacatgaactgtgtaaaggttagtcatacattgttcatttgtaaaactgcacatgggtgtgtgcaaaccgttttgggttacacatttacaagcaacttatataataatactaaactacaataattcatgtataaaagtaagggcgtaaccgaaatcggttgaaccgaaaccggttagtataaaagcagacattttatgcaccaaaagagaactgcaatgttccaggacccacaggagcgacccagaaagttaccacagttatgcacagagctgcaaacaactatacatgatataatattagaatgtgtgtactgcaagcaacagttactgcgacgtgaggtatatgactttgcttttcgggatttatgcatagtatatagagatgggaatccatatgctgtatgtgataaatgtttaaagttttattctaaaattagtgagtatagacattattgttatagtgtgtatggaacaacattagaacagcaatacaacaaaccgttgtgtgatttgttaattaggtgtattaactgtcaaaagccactgtgtcctgaagaaaagcaaagacatctggacaaaaagcaaagattccataatataaggggtcggtggaccggtcgatgtatgtcttgttgcagatcatcaagaacacgtagagaaacccagctgtaatcatgcatggagatacacctacattgcatgaatatatgttagatttgcaaccagagacaactgatctctactgttatgagcaattaaatgacagctcagaggaggaggatgaaatagatggtccagctggacaagcagaaccggacagagcccattacaatattgtaaccttttgttgcaagtgtgactctacgcttcggttgtgcgtacaaagcacacacgtagacattcgtactttggaagacctgttaatgggcacactaggaattgtgtgccccatctgttctcagaaaccataatctacc

SEQ ID NO: 78 - DNA, 7906 bp, Homo sapiens
  source 1..7906: mol_type = genomic DNA; note = UNCseq2468
atggctgatcctgcaggtaccaatggggaagagggtacgggatgtaatggatggttttatgtagaggctgtagtggaaaaaaaaacaggggatgctatatcagatgacgagaacgaaaatgacagtgatacaggtgaagatttggtagattttatagtaaatgataatgattatttaacacaggcagaaacagagacagcacatgcgttgtttactgcacaggaagcaaaacaacatagagatgcagtacaggttctaaaacgaaagtatttgggtagtccacttagtgatattagtggatgtgtagacaataatattagtcctagattaaaagctatatgtatagaaaaacaaagtagagctgcaaaaaggagattatttgaaagcgaagacagcgggtatggcaatactgaagtggaaactcagcagatgttacaggtagaagggcgccatgagactgaaacaccatgtagtcagtatagtggtggaagtgggggtggttgcagtcagtacagtagtggaagtgggggagagggtgttagtgaaagacacactatatgccaaacaccacttacaaatattttaaatgtactaaaaactagtaatgcaaaggcagcaatgttagcaaaatttaaagagttatacggggtgagtttttcagaattagtaagaccatttaaaagtaataaatcaacgtgttgcgattggtgtattgctgcatttggacttacacccagtatagctgacagtataaaaacactattacaacaatattgtttatatttacacattcaaagtttagcatgttcatggggaatggttgtgttactattagtaagatataaatgtggaaaaaatagagaaacaattgaaaaattgctgtctaaactattatgtgtgtctccaatgtgtatgatgatagagcctccaaaattgcgtagtacagcagcagcattatattggtataaaacaggtatatcaaatattagtgaagtgtatggagacacgccagaatggatacaaagacaaacagtattacaacatagttttaatgattgtacatttgaattatcacagatggtacaatgggcctacgataatgacatagtagacgatagtgaaattgcatataaatatgcacaattggcagacactaatagtaatgcaagtgcctttctaaaaagtaattcacaggcaaaaattgtaaaggattgtgcaacaatgtgtagacattataaacgagcagaaaaaaaacaaatgagtatgagtcaatggataaaatatagatgtgatagggtagatgatggaggtgattggaagcaaattgttatgtttttaaggtatcaaggtgtagagtttatgtcatttttaactgcattaaaaagatttttgcaaggcatacctaaaaaaaattgcatattactatatggtgcagctaacacaggtaaatcattatttggtatgagtttaatgaaatttctgcaagggtctgtaatatgttttgtaaattctaaaagccatttttggttacaaccattagcagatgccaaaataggtatgttagatgatgctacagtgccctgttggaactacatagatgacaatttaagaaatgcattggatggaaatttagtttctatggatgtaaagcatagaccattggtacaactaaaatgccctccattattaattacatctaacattaatgctggtacagattctaggtggccttatttacataatagattggtggtgtttacatttcctaatgagtttccatttgacgaaaacggaaatccagtgtatgagcttaatgataagaactggaaatcctttttctcaaggacgtggtccagattaagtttgcacgaggacgaggacaaggaaaacgatggagactctttgccaacgtttaaatgtgtgtcaggacaaaatactaacacattatgaaaatgatagtacagacctacgtgaccatatagactattggaaacacatgcgcctagaatgtgctatttattacaaggccagagaaatgggatttaaacatattaaccaccaggtggtgccaacactggctgtatcaaagaataaagcattacaagcaattgaactgcaactaacgttagaaacaatatataactcacaatatagtaatgaaaagtggacattacaagacgttagccttgaagtgtatttaactgcaccaacaggatgtataaaaaaacatggatatacagtggaagtgcagtttgatggagacatatgcaatacaatgcattatacaaactggacacatatatatatttgtgaagaagcatcagtaactgtggtagagggtcaagttgactattatggtttatattatgttcatgaaggaatacgaacatattttgtgcagtttaaagatgatgcagaaaaatatagtaaaaataaagtatgggaagttcatgcgggtggtcaggtaatattatgtcctacatctgtgtttagcagcaacgaagtatcctctcctgaaattattaggcagcacttggccaaccactccgccgcgacccataccaaagccgtcgccttgggcaccgaagaaacacagacgactatccagcgaccaagatcagagccagacaccggaaacccctgccacaccactaagttgttgcacagagactcagtggacagtgctccaatcctcactgcatttaacagctcacacaaaggacggattaactgtaatagtaacactacacccatagtacatttaaaaggtgatgctaatactttaaaatgtttaagatatagatttaaaaagcattgtacattgtatactgcagtgtcgtctacatggcattggacaggacataatgtaaaacataaaagtgcaattgttacacttacatatgatagtgaatggcaacgtgaccaatttttgtctcaagttaaaataccaaaaactattacagtgtctactggatttatgtctatatgacaaatcttgatactgcatccacaacattactggcgtgctttttgctttgcttttgtgtgcttttgtgtgtctgcctattaatacgtccgctgcttttgtctgtgtctacatacacatcattaatactattggtattactattgtggataacagcagcctctgcgtttaggtgttttattgtatatattgtatttgtttatataccattatttttaatacatacacatgcacgctttttaattacataatgtatatgtacataatgtaattgttacatataattgttgtataccataacttactattttttcttttttattttcatatataatttttttttttgtttgtttgtttgttttttaataaactgttatcacttaacaatgcgacacaaacgttctgcaaaacgcacaaaacgtgcatcggctacccaactttataaaacatgcaaacaggcaggtacatgtccacctgacattatacctaaggttgaaggcaaaactattgctgatcaaatattacaatatggaagtatgggtgtattttttggtgggttaggaattggaacagggtcgggtacaggcggacgcactgggtatattccattgggaacaaggcctcccacagctacagatacacttgctcctgtaagaccccctttaacagtagatcctgtgggcccttctgatccttctatagtttctttagtggaagaaactagttttattgatgctggtgcaccaacatctgtaccttccattcccccagatgtatcaggatttagtattactacttcaactgataccacacctgctatattagatattaataatactgttactactgttactacacataataatcccactttcactgacccatctgtattgcagcctccaacacctgcagaaactggagggcattttacactttcatcatccactattagtacacataattatgaagaaattcctatggatacatttattgttagcacaaaccctaacacagtaactagtagcacacccataccagggtctcgcccagtggcacgcctaggattatatagtcgcacaacacaacaagttaaagttgtagaccctgcttttataaccactcccactaaacttattacatatgataatcctgcatatgaaggtatagatgtggataatacattatatttttctagtaatgataatagtattaatatagctccagatcctgactttttggatatagttgctttacataggccagcattaacctctaggcgtactggcattaggtacagtagaattggtaataaacaaacactacgtactcgtagtggaaaatctataggtgctaaggtacattattattatgatttaagtactattgatcctgcagaagaaatagaattacaaactataacaccttctacatatactaccacttcacatgcagcctcacctacttctattaataatggattatatgatatttatgcagatgactttattacagatacttctacaaccccggtaccatctgtaccctctacatctttatcaggttatattcctgcaaatacaacaattccttttggtggtgcatacaatattcctttagtatcaggtcctgatatacccattaatataactgaccaagctccttcattaattcctatagttccagggtctccacaatatacaattattgctgatgcaggtgacttttatttacatcctagttattacatgttacgaaaacgacgtaaacgtttaccatattttttttcagatgtctctttggctgcctagtgaggccactgtctacttgcctcctgtcccagtatctaaggttgtaagcacggatgaatatgttgcacgcacaaacatatattatcatgcaggaacatccagactacttgcagttggacatccctattttcctattaaaaaacctaacaataacaaaatattagttcctaaagtatcaggattacaatacagggtatttagaatacatttacctgaccccaataagtttggttttcctgacacctcattttataatccagatacacagcggctggtttgggcctgtgtaggtgttgaggtaggtcgtggtcagccattaggtgtgggcattagtggccatcctttattaaataaattggatgacacagaaaatgctagtgcttatgcagcaaatgcaggtgtggataatagagaatgtatatctatggattacaaacaaacacaattgtgtttaattggttgcaaaccacctataggggaacactggggcaaaggatccccatgtaccaatgttgcagtaaatccaggtgattgtccaccattagagttaataaacacagttattcaggatggtgatatggttgatactggctttggtgctatggactttactacattacaggctaacaaaagtgaagttccactggatatttgtacatctatttgcaaatatccagattatattaaaatggtgtcagaaccatatggcgacagcttatttttttatttacgaagggaacaaatgtttgttagacatttatttaatagggctggtgctgttggtgaaaatgtaccagacgatttatacattaaaggctctgggtctactgcaaatttagccagttcaaattattttcctacacctagtggttctatggttacctctgatgcccaaatattcaataaaccttattggttacaacgagcacagggccacaataatggcatttgttggggtaaccaactatttgttactgttgttcatactacacgcagtacaaatatgtcattatgtgctgccatatctacttcagaaactacatataaaaatactaactttaaggagtacctacgacatggggaggaatatgatttacagtttatttttcaactgtgcaaaataaccttaactgcagacgttatgacatacatacattctatgaattccactattttggaggactggaattttggtctacaacctcccccaggaggcacactagaagatacttataggtttgtaacatcccaggcaattgcttgtcaaaaacatacacctccagcacctaaagaagatccccttaaaaaatacactttttgggaagtaaatttaaaggaaaagttttctgcagacctagatcagtttcctttaggacgcaaatttttactacaagcaggattgaaggccaaaccaaaatttacattaggaaaacgaaaagctacacccaccacctcatctacctctacaactgctaaacgcaaaaaacgtaagctgtaagtattgtatgtatgttgaattagtgttgtttgttgtgtatatgtttgtatgtgcttgtatgtgcttgtaaatattaagttgtatgtgtgtttgtatgtatggtataataaacacgtgtgtatgtgtttttaaatgcttgtgtaactattgtgtcatgcaacataaataaacttattgtttcaacacctactaattgtgttgtggttattcattgtatataaactatatttgctacatcctgtttttgttttatatatactatattttgtagcgccagcggccattttgtagcttcaaccgaattcggttgcatgctttttggcacaaaatgtgtttttttaaatagttctatgtcagcaactatagtttaaacttgtacgtttcctgcttgccatgcgtgccaaatccctgttttcctgacctgcactgcttgccaaccattccattgttttttacactgcactatgtgcaactactgaatcactatgtacattgtgtcatataaaataaatcactatgcgccaacgccttacataccgctgttaggcacatatttttggcttgttttaactaacctaattgcatatttggcataaggtttaaacttctaaggccaactaaatgtcaccctagttcatacatgaactgtgtaaaggttagtcatacattgttcatttgtaaaactgcacatgggtgtgtgcaaaccgttttgggttacacatttacaagcaacttatataataatactaaactacaataattcatgtataaaactaagggcgtaaccgaaatcggttgaaccgaaaccggttagtataaaagcagacattttatgcaccaaaagagaactgcaatgtttcaggacccacaggagcgacccagaaagttaccacagttatgcacagagctgcaaacaactatacatgatataatattagaatgtgtgtactgcaagcaacagttactgcgacgtgaggtatatgactttgcttttcgggatttatgcatagtatatagagatgggaatccatatgctgtatgtgataaatgtttaaagttttattctaaaattagtgagtatagacattattgttatagtgtgtatggaacaacattagaacagcaatacaacaaaccgttgtgtgatttgttaattaggtgtattaactgtcaaaagccactgtgtcctgaagaaaagcaaagacatctggacaaaaagcaaagattccataatataaggggtcggtggaccggtcgatgtatgtcttgttgcagatcatcaagaacacgtagagaaacccagctgtaatcatgcatggagatacacctacattgcatgaatatatgttagatttgcaaccagagacaactgatctctactgttatgagcaattaaatgacagctcagaggaggaggatgaaatagatggtccagctggacaagcagaaccggacagagcccattacaatattgtaaccttttgttgcaagtgtgactctacgcttcggttgtgcgtacaaagcacacacgtagacattcgtactttggaagacctgttaatgggcacactaggaattgtgtgccccatctgttctcagaaaccataatctacc

SEQ ID NO: 79 - DNA, 7906 bp, Homo sapiens
  source 1..7906: mol_type = genomic DNA; note = UNCseq2476
atggctgatcctgcaggtaccaatggggaagagggtacgggatgtaatggatggttttatgtagaggctgtagtggaaaaaaaaacaggggatgctatatcagatgacgagaacgaaaatgacagtgatacaggtgaagatttggtagattttatagtaaatgataatgattatttaacacaggcagaaacagagacagcacatgcgttgtttactgcacaggaagcaaaacaacatagagatgcagtacaggttctaaaacgaaagtatttgggtagtccacttagtgatattagtggatgtgtagacaataatattagtcctagattaaaagctatatgtatagaaaaacaaagtagagctgcaaaaaggagattatttgaaagcgaagacagcgggtatggcaatactgaagtggaaactcagcagatgttacaggtagaagggcgccatgagactgaaacaccatgtagtcagtatagtggtggaagtgggggtggttgcagtcagtacagtagtggaagtgggggagagggtgttagtgaaagacacactatatgccaaacaccacttacaaatattttaaatgtactaaaaactagtaatgcaaaggcagcaatgttagcaaaatttaaagagttatacggggtgagtttttcagaattagtaagaccatttaaaagtaataaatcaacgtgttgcgattggtgtattgctgcatttggacttacacccagtatagctgacagtataaaaacactattacaacaatattgtttatatttacacattcaaagtttagcatgttcatggggaatggttgtgttactattagtaagatataaatgtggaaaaaatagagaaacaattgaaaaattgctgtctaaactattatgtgtgtctccaatgtgtatgatgatagagcctccaaaattgcgtagtacagcagcagcattatattggtataaaacaggtatatcaaatattagtgaagtgtatggagacacgccagaatggatacaaagacaaacagtattacaacatagttttaatgattgtacatttgaattatcacagatggtacaatgggcctacgataatgacatagtagacgatagtgaaattgcatataaatatgcacaattggcagacactaatagtaatgcaagtgcctttctaaaaagtaattcacaggcaaaaattgtaaaggattgtgcaacaatgtgtagacattataaacgagcagaaaaaaaacaaatgagtatgagtcaatggataaaatatagatgtgatagggtagatgatggaggtgattggaagcaaattgttatgtttttaaggtatcaaggtgtagagtttatgtcatttttaactgcattaaaaagatttttgcaaggcatacctaaaaaaaattgcatattactatatggtgcagctaacacaggtaaatcattatttggtatgagtttaatgaaatttctgcaagggtctgtaatatgttttgtaaattctaaaagccatttttggttacaaccattagcagatgccaaaataggtatgttagatgatgctacagtgccctgttggaactacatagatgacaatttaagaaatgcattggatggaaatttagtttctatggatgtaaagcatagaccattggtacaactaaaatgccctccattattaattacatctaacattaatgctggtacagattctaggtggccttatttacataatagattggtggtgtttacatttcctaatgagtttccatttgacgaaaacggaaatccagtgtatgagcttaatgataagaactggaaatcctttttctcaaggacgtggtccagattaagtttgcacgaggacgaggacaaggaaaacgatggagactctttgccaacgtttaaatgtgtgtcaggacaaaatactaacacattatgaaaatgatagtacagacctacgtgaccatatagactattggaaacacatgcgcctagaatgtgctatttattacaaggccagagaaatgggatttaaacatattaaccaccaggtggtgccaacactggctgtatcaaagaataaagcattacaagcaattgaactgcaactaacgttagaaacaatatataactcacaatatagtaatgaaaagtggacattacaagacgttagccttgaagtgtatttaactgcaccaacaggatgtataaaaaaacatggatatacagtggaagtgcagtttgatggagacatatgcaatacaatgcattatacaaactggacacatatatatatttgtgaagaagcatcagtaactgtggtagagggtcaagttgactattatggtttatattatgttcatgaaggaatacgaacatattttgtgcagtttaaagatgatgcagaaaaatatagtaaaaataaagtatgggaagttcatgcgggtggtcaggtaatattatgtcctacatctgtgtttagcagcaacgaagtatcctctcctgaaactattaggcagcacttggccaaccactccgccgcgacccataccaaagccgtcgccttgggcaccgaagaaacacagacgactatccagcgaccaagatcagagccagacaccggaaacccctgccacaccactaagttgttgcacagagactcagtggacagtgctccaatcctcactgcatttaacagctcacacaaaggacggattaactgtaatagtaacactacacccatagtacatttaaaaggtgatgctaatactttaaaatgtttaagatatagatttaaaaagcattgtacattgtatactgcagtgtcgtctacatggcattggacaggacataatgtaaaacataaaagtgcaattgttacacttacatatgatagtgaatggcaacgtgaccaatttttgtctcaagttaaaataccaaaaactattacagtgtctactggatttatgtctatatgacaaatcttgatactgcatccacaacattactggcgtgctttttgctttgcttttgtgtgcttttgtgtgtctgcctattaatacgtccgctgcttttgtctgtgtctacatacacatcattaatactattggtattactattgtggataacagcagcctctgcgtttaggtgttttattgtatatattgtatttgtttatataccattatttttaatacatacacatgcacgctttttaattacataatgtatatgtacataatgtaattgttacatataattgttgtataccataacttactattttttcttttttatttttatatataatttttttttttgtttgtttgtttgttttttaataaactgttatcacttaacaatgcgacacaaacgttctgcaaaacgcacaaaacgtgcatcggctacccaactttataaaacatgcaaacaggcaggtacatgtccacctgacattatacctaaggttgaaggcaaaactattgctgatcaaatattacaatatggaagtatgggtgtattttttggtgggttaggaattggaacagggtcgggtacaggcggacgcactgggtatattccattgggaacaaggcctcccacagctacagatacacttgctcctgtaagaccccctttaacagtagatcctgtgggcccttctgatccttctatagtttctttagtggaagaaactagttttattgatgctggtgcaccaacatctgtaccttccatccccccagatgtatcaggatttagtattactacttcaactgataccacacctgctatattagatattaataatactgttactactgttactacacataataatcccactttcactgacccatctgtattgcagcctccaacacctgcagaaactggagggcattttacactttcatcatccactattagtacacataattatgaagaaattcctatggatacatttattgttagcacaaaccctaacacagtaactagtagcacacccataccagggtctcgcccagtggcacgcctaggattatatagtcgcacaacacaacaggttaaagttgtagaccctgcttttgtaaccactcccactaaacttattacatatgataatcctgcatatgaaggtatagatgtggataatacattatatttttctagtaatgataatagtattaatatagctccagatcctgactttttggatatagttgctttacataggccagcattaacctctaggcgtactggcattaggtacagtagaattggtaataaacaaacactacgtactcgtagtggaaaatctataggtgctaaggtacattattattatgatttcagtactattgatcctgcagaagaaatagaattacaaactataacaccttctacatatactaccacttcacatgcagcctcacctacttctattaataatggattatatgatatttatgcagatgactttattacagatacttctacaaccccggtaccatctgtaccctctacatctttatcaggttatattcctgcaaatacaacaattccttttggtggtgcatacaatattcctttagtatcaggtcctgatatacccattaatataactgaccaagctccttcattaattcctatagttccagggtctccacaatatacaattattgctgatgcaggtgacttttatttacatcctagttattacatgttacgaaaacgacgtaaacgtttaccatattttttttcagatgtctctttggctgcctagtgaggccactgtctacttgcctcctgtcccagtatctaaggttgtaagcacggatgaatatgttgcacgcacaaacatatattatcatgcaggaacatccagactacttgcagttggacatccctattttcctattaaaaaacctaacaataacaaaatattagttcctaaagtatcaggattacaatacagggtatttagaatacatttacctgaccccaataagtttggttttcctgacacctcattttataatccagatacacagcggctggtttgggcctgtgtaggtgttgaggtaggtcgtggtcagccattaggtgtgggcattagtggccatcctttattaaataaattggatgacacagaaaatgctagtgcttatgcagcaaatgcaggtgtggataatagagaatgtatatctatggattacaaacaaacacaattgtgtttaattggttgcaaaccacctataggggaacactggggcaaaggatccccatgtaccaatgttgcagtaaatccaggtgattgtccaccattagagttaataaacacagttattcaggatggtgatatggttgatactggctttggtgctatggactttactacattacaggctaacaaaagtgaagttccactggatatttgtacatctatttgcaaatatccagattatattaaaatggtgtcagaaccatatggcgacagcttatttttttatttacgaagggaacaaatgtttgttagacatttatttaatagggctggtactgttggtgaaaatgtaccagacgatttatacattaaaggctctgggtctactgcaaatttagccagttcaaattattttcctacacctagtggttctatggttacctctgatgcccaaatattcaataaaccttattggttacaacgagcacagggccacaataatggcatttgttggggtaaccaactatttgttactgttgttgatactacacgcagtacaaatatgtcattatgtgctgccatatctacttcagaaactacatataaaaatactaactttaaggagtacctacgacatggggaggaatatgatttacagtttatttttcaactgtgcaaaataaccttaactgcagacgttatgacatacatacattctatgaattccactattttggaggactggaattttggtctacaacctcccccaggaggcacactagaagatacttataggtttgtaacatcccaggcaattgcttgtcaaaaacatacacctccagcacctaaagaagatccccttaaaaaatacactttttgggaagtaaatttaaaggaaaagttttctgcagacctagatcagtttcctttaggacgcaaatttttactacaagcaggattgaaggccaaaccaaaatttacattaggaaaacgaaaagctacacccaccacctcatctacctctacaactgctaaacgcaaaaaacgtaagctgtaagtattgtatgtatgttgaattagtgttgtttgttgtttatatgtttgtatgtgcttgtatgtgcttgtaaatattaagttgtatgtgtgtttgtatgtatggtataataaacacgtgtgtatgtgtttttaaatgcttgtgtaactattgtgtcatgcaacataaataaacttattgtttcaacacctactaattgtgttgtggttattcattgtatataaactatatttgctacatcctgtttttgttttatatatactatattttgtagcgccagcggccattttgtagcttcaaccgaattcggttgcatgctttttggcacaaaatgtgtttttttaaatagttctatgtcagcaactatggtttaaacttgtacgtttcctgcttgccatgcgtgccaaatccctgttttcctgacctgcactgcttgccaaccattccattgttttttacactgcactatgtgcaactactgaatcactatgtacattgtgtcatataaaataaatcactatgcgccaacgccttacataccgctgttaggcacatatttttggcttgttttaactaacctaattgcatatttggcataaggtttaaacttctaaggccaactaaatgtcaccctagttcatacatgaactgtgtaaaggttagtcatacattgttcatttgtaaaactgcacatgggtgtgtgcaaaccgttttgggttacacatttacaagcaacttatataataatactaaactacaataatccatgtataaaactaagggcgtaaccgaaatcggttgaaccgaaaccggttagtataaaagcagacattttatgcaccaaaagagaactgcaatgtttcaggacccacaggagcgacccggaaagttaccacagttatgcacagagctgcaaacaactatacatgatataatattagaatgtgtgtactgcaagcaacagttactgcgacgtgaggtatatgactttgcttttcgggatttatgcatagtatatagagatgggaatccatatgctgtatgtgataaatgtttaaagttttattctaaaattagtgagtatagacattattgttatagtttgtatggaacaacattagaacagcaatacaacaaaccgttgtgtgatttgttaattaggtgtattaactgtcaaaagccactgtgtcctgaagaaaagcaaagacatctggacaaaaagcaaagattccataatataaggggtcggtggaccggtcgatgtatgtcttgttgcagatcatcaagaacacgtagagaaacccagctgtaatcatgcatggagatacacctacattgcatgaatatatgttagatttgcaaccagagacaactgatctctactgttatgagcaattaaatgacagctcagaggaggaggatgaaatagatggtccagctggacaagcagaaccggacagagcccattacaatattgtaaccttttgttgcaagtgtgactctacgcttcggttgtgcgtacaaagcacacacgtagacattcgtactttggaagacctgttaatgggcacactaggaattgtgtgccccatctgttctcagaaaccataatctacc

SEQ ID NO: 80 - DNA, 7906 bp, Homo sapiens
  source 1..7906: mol_type = genomic DNA; note = UNCseq2491
atggctgatcctgcaggtaccaatggggaagagggtacgggatgtaatggatggttttatgtagaggctgtagtggaaaaaaaaacaggggatgctatatcagatgacgagaacgaaaatgacagtgatacaggtgaagatttggtagattttatagtaaatgataatgattatttgacacaggcagaaacagagacagcacatgcgttgtttactgcacaggaagcaaaagaacatagagatgcagtacaggttctaaaacgaaagtatttgggtagtccacttagtgatattagtggatgtgtagacaataatattagtcctagattaaaagctatatgtatagaaaaacaaagtagagctgcaaaaaggagattatttgaaagcgaagacagcgggtatggcaatactgaagtggaaactcagcagatgttacaggtagaagggcgccatgagactgaaacaccatgtagtcagtatagtggtggaagtgggggtggtagcagtcagtatagtagtggaagtgggggagagggtgttagtgaaagacacactatatgcgaaacaccacttacaaatattttaaatgtactaaaaactagtaatgcaaaggcagcaatgctagcaaaatttaaagagttatacggggtgagttttacagaattagtaagaccatttaaaagtaataaatcaacgtgttgcgattggtgtattgctgcatttggacttacacccagtatagctgacagtataaaaacactattacaacaatattgtttatatttacacattcaaagtttagcatgttcatggggaatggttgtgttactattagtaagatataaatgtggaaaaaatagagaaacaattgaaaaattgctgtctaaactattatgtgtgtctccaatgtgtatgatgatagagcctccaaaattgcgtagtacagcagcagcattatattggtataaaacaggtatatcaaatattagtgaagtgtatggagacacgccagaatggatacaaagacaaacagtattacaacatagttttaatgattgtacatttgaattatcacagatggtacaatgggcctacgataatgacatagtagacgatagtgaaattgcatataaatatgcacaattggcagacactaatagtaatgcaagtgcctttctaaaaagtaattcacaggcaaaaattgtaaaggattgtgcaacaatgtgtagacattataaacgagcagaaaaaaaacaaatgagtatgagtcaatggataaaatatagatgtgatagggtagatgatggaggtgattggaagcaaattgttatgtttttaaggtatcaaggtgtagagtttatgtcatttttaagtgcattaaaaagatttctgcaaggcatacctaaaaaaaattgcatattactatatggtgcagctaacacaggtaaatcattatttggtatgagtttaatgaaattcctgcaagggtctgtaatatgttttgtaaattctaaaagccatttttggttacaaccattagcagatgccaaaataggtatgttagatgatgctacagtgccctgttggaactacatagatgacaatttaagaaatgcattggatggaaatttagtttctatggatgtaaagcatagaccattggtacaactaaaatgccctccattattaattacatctaacattaatgctggtacagattccaggtggccttatttacataatcgattggtggtgtttacatttcctaatgagtttccatttgacaaaaacggaaatccagtgtatgagcttaatgataagaactggaaatcctttttctcaaggacgtggtccagattaagtttgcacgaggacgaggacaaggaaaacgatggagactctttgccaacgtttaaatgtgtgtcaggacaaaatactaacacattatgaaaatgatagtacagacctacgtgaccatatagactattggaaacacatgcgcctagaatgtgctatttattacaaggccagagaaatgggatttaaacatattaaccaccaggtggtgccaacactggctgtatcaaagaataaagcattacaagcaattgaactgcaactaacgttagaaacaatatataactcacaatatagtaatgaaaagtggacattacaagacgttagccttgaagtgtatttaactgcaccaacaggatgtataaaaaaacatggatatacagtggaagtgcagtttgatggagacatatgcaatacaatgcattatacaaactggacacatatatatatttgtgaagacgcatcagtaactgtggtagagggtcaagttgactattatggtatatattatgttcatgaaggaatacgaacatattttgtgcagtttaaagatgatgcagaaaaatatagtaaaaataaagtatgggaagttcatgcgggtggtcaggtaatattatgtcctacatctgtgtttagcagcgacgaagtatcctctgctgaaattactaggcagcacttggccaaccactccgccgcgacccataccaaagccgtcgccttgggcaccaaagaaacacagacgactatccagcgaccaagattagagccagacaccggaaacccctgccacaccaacaagttgttgcacagagactccgtggacagtgctccaatcctcactgcagttaacagctcacacaaaggacggattaactgtaatagtaacactacacccatagtacatttaaaaggtgatgctaatactttaaaatgtttaagatacagatttaaaaagcattgtacattgtatactgcagtgtcgtccacatggcattggacaggacataatgtaaaacataaaagtgcaattgttacacttacatatgatagtgaatggcaacgtgaccaatttttgtctcaagtgaaaataccaaaaactattacagtgtctactggatttatgtctatatgacaaaccttgatactgcatccacaacattactggcgtgctttttgctttgcttttgtgtgcttttgtgtgtctgcctattaatacgtccgctgcttttgtctgtgtctacatacacatcattaatactattggtattactattgtggataacagcagcctctgcatttaggtgttttattgtatatattgtatttgtttatataccattatttttaatacatacacatgcacgcttcttaattacataatgtatatgtacataatgtaattgttacatataattgttgtataccataaattactatttttttttttttatttttatatatagtttttttttttgtttatttgtttgttttttaataaactgttattacttaacaatgcgacacaaacgttctgcaaaacgcacaaaacgtgcatcggccacccaactttataaaacatgcaaacaggcaggtacatgtccacctgacattatacctaaggttgaaggcaaaactattgctgatcaaatattacaatatggaagtatgggtgtattttttggtgggttaggaattggaacagggtctggtacaggcggacgcactgggtacattccattaggaacaaggcctcccacagctacagatacacttgctcctgtaagaccccctttaacagtagatcctgtgggcccttctgatccttctatagtttctttagtggaagaaactagttttattgatgctggtgcaccaacatctgtaccttccattcccccagatgtatcaggatttagtattactacttcaactgataccacacctgctatattagatattaataatactgttactactgttactacacataataatcccactttcactgacccatctgtattgcagcctccaacacctgcagaaactggagggcattttacactttcatcatccactattagtacacataattatgaagaaattcctatggatacatttattgttagcacaaaccctaacacagtaactagtagcacacccataccggggtctcgcccagtggcacgcctaggattatatagtcgcacaacacaacaagttaaggttgtggaccctgcttttgtaaccgctcccactaaacttattacatatgataatcctgcatatgaaggtatagatgtggataatacattttattttcctagtaatgataatagtattaatatagctccagatcctgactttttggatatagttgctttacataggccagcattaacctctaggcgtactggcattaggtacagtagaattggtaataaacaaacactacgtactcgtagtggaaaatctataggtgctaaggtacattattattatgatttaagtactattgatcctgcagaagaaatagaattacaaactataacaccttctacatatactaccacttcccatgcagcctcaccaacttctattaataatggattatatgatatttatgcagatgactttattacagatacttctacaaccccggtaccagctataccctctacatccttatcaggttatattcctgcaaatacaacaattccttttggtggtgcatacaatattcctttagtatcaggtcctgatatacccattaatacaactgaccaaactccttcattaattcctatagttccagggtctccacaatatacaattattgctgatggaggtgacttttatttacatcctagttattacatgttacgaaaacgacgtaaacgtttaccatattttttttcagatgtctctttggctgcctagtgaggccactgtctacttgcctcctgtcccagtatctaaagttgtaagcacggatgaatatgttgcacgcacaaacatatattatcatgcaggaacatccagactacttgcagttggacatccctattttcctattaaaaaacctaacaataacaaaatattagttcctaaagtatcaggattacaatacagggtatttagaatacatttacctgaccccaataagtttggttttcctgacacctcattttacaatccagatacacagcggctggtttgggcctgtgtaggtgttgaggtaggtcgtggtcagccattaggtgtaggcattagtggccatcctttattaaataaattggatgacacagaaaatgctagtgcttatgcagcaaatgcaggtgtggataatagagaatgtatatctatggattacaaacaaacacaattgtgtttaattggttgcaaaccacctataggggaacactggggcaaaggatccccatgtaccaatgttgcagtaactccaggtgattgtccaccattagagttaataaacacagttattcaggatggtgatatggttgataccggctttggtgctatggactttactacattacaggctaacaaaagtgaagttccactggatatttgtacatctatttgcaaatatccagattatattaaaatggtgtcagaaccatatggcgacagcttatttttttatttacgaagggaacaaatgtttgttagacatttatttaatagggctggtactgttggtgaaaatgtaccagacgatttatacattaaaggctctgggtctactgcaaatttagccagttcaaattattttcctacacctagtggttctatggttacctctgatgcccaaatatttaataaaccttattggttacaacgagcacagggccacaataatggcatttgttggggtaaccaactatttgttactgttgttgatactacacgcagtacaaatatgtcattatgtgctgccatatctacttcagaacctacatataaaaatactaactttaaggagtacctacgacatggggaggaatatgatttacagtttatttttcaactgtgcaaaataaccttaactgcagacgttatgtcatacatacattctatgaattccactattttggaggactggaattttggtctacaacctcccccaggaggcacactagaagatacttataggtttgtaacatcccaggcaattgcttgtcaaaaacatacacctccagcacctaaagaagatccccttaaaaaatacactttttgggaagtaaatttaaaggaaaagttttctgcagacctagatcagtttcctttaggacgcaaatttttactacaagcaggattgaaggccaaaccaaaatttacattaggaaaacgaaaagctacacccaccacctcatctacctctacaactgctaaacgcaaaaaacgtaagctgtaagtattgtatgtatgttgaattagtgttgtttgttgtgtatatgtttgtatgtgcttgtatgtgcttgtaaatattacgttgtatgtgtgtttgtatgtatggtataataaacacgtgtgtatgtgtttttaaatgcttgtgtaactattgtgtcatgcaacataaataaacttattgtttcaacacctactaattgtgttgtggttattcattgtatataaactatatttgctacattttgtttttgttttatatatactatattttgtagcgccagcggccattttgtagcttcaaccgaattcggttgcatgctttttggcacaaactgtatttttttaaatagttctatgtcagcaactatggtttaaacttgtacgtttcctgcttgccatgcgtgccaaatccctgttttcctgacctgcactgcttgccaaccattccattgttttttacactgcactatgtgcaactactgaatcactatgtacattgtgtcatataaaataaatcactatgcgccaacgccttacataccgctgttaggcacatatttttggcttgttttaactcacctaattgcatatttggcataaggtttaaacttctaaggccaactaaatgtcaccctagttcatacatgaactgtgtaaaggttagtcatacattgttcatttgtaaaactgcacatgggtgtgtgcaaaccgttttgggttacacatttacaaggaacttatataataatactaaactacaataattcatgtataaaactaagggcgtaaccgaaatcggttgaaccgaaaccggttagtataaaagcagacagtttatgcaccaaaagagaactgcaatgtttcaggacccacaggagcgacccagaaagttaccacagttatgcacagagctgcaaacaactatacatgatataatattagaatgtgtgtactgcaagcaacagttactgcgacgtgaggtatatgactttgcttttcgggatttatgcatagtatatagagatgggaatccatatgctgtatgtgataaatgtttaaagttttattctaaaattagtgagtatagacattattgttatagtgtgtatggaacaacattagaacagcaatacaacaaaccgttgtgtgatttgttaattaggtgtattaactgtcaaaagccactgtgtcctgaagaaaagcaaagacatctggacaaaaagcaaagattccataatataaggggtcggtggaccggtcgatgtatgtcttgttgcagatcatcgagaacacgtagagaaacccagctgtaatcatgcatggagatacacctacattgcatgaatatatgttagatttgcaaccagagacaactgatctctactgttatgagcaattaaatgacagctcagaggaggaggatgaaatagatggtccagctggacaagcagaaccggacagagcccattacaatattgtaaccttctgttgcaagtgtgactctacgcttcggttgtgcgtacaaagcacacacgtagacatccgtacgttggaagacctgttaatgggcacactaggaattgtgtgccccatctgttctcagaaaccataatctacc

SEQ ID NO: 81 - DNA, 7906 bp, Homo sapiens
  source 1..7906: mol_type = genomic DNA; note = UNCseq2523
atggctgatcctgcaggtaccaatggggaagagggtacgggatgtaatggatggttttatgtagaggctgtagtggaaaaaaaaacaggggatgctatatcagatgacgagaacgaaaatgacagtgatacaggtgaagatttggtagattttatagtaaatgataatgattatttaacacaggcagacacagagacagcacatgcgttgtttactgcacaggaagcaaaacaacatagagatgcagtacaggttctaaaacgaaagtatttgggtagtccacttagtgatattagtggatgtgtagacaataatattagtcctagattaaaagctatatgtatagaaaaacaaagtagagctgcaaaaaggagattatttgaaagcgaagacagcgggtatggcaatactgaagtggaaactcagcagatgttacaggtagaagggcgccatgagactgaaacaccatgtagtcagtatagtggtggaagtgggggtggttgcagtcagtacagtagtggaagtgggggagagggtgttagtgaaagacacactatatgccaaacaccacttacaaatattttaaatgtactaaaaactagtaatgcaaaggcagcaatgttagcaaaatttaaagagttatacggggtgagtttttcagaattagtaagaccatttaaaagtaataaatcaacgtgttgcgattggtgtattgctgcatttggacttacacccagtatagctgacagtataaaaacactattacaacaatattgtttatatttacacattcaaagtttagcatgttcatggggaatggttgtgttactattagtaagatataaatgtggaaaaaatagagaaacaattgaaaaattgctgtctaaactattatgtgtgtctccaatgtgtatgatgatagagcctccaaaattgcgtagtacagcagcagcattatattggtataaaacaggtatatcaaatattagtgaagtgtatggagacacgccagaatggatacaaagacaaacagtattacaacatagttttaatgattgtacatttgaattatcacagatggtacaatgggcctacgataatgacatagtagacgatagtgaaattgcatataaatatgcacaattggcagacactaatagtaatgcaagtgcctttctaaaaagtaattcacaggcaaaaattgtaaaggattgtgcaacaatgtgtagacattataaacgagcagaaaaaaaacaaatgagtatgagtcaatggataaaatatagatgtgatagggtagatgatggaggtgattggaagcaaattgttatgtttttaaggtatcaaggtgtagagtttatgtcatttttaactgcattaaaaagatttttgcaaggcatacctaaaaaaaattgcatattactatatggtgcagctaacacaggtaaatcattatttggtatgagtttaatgaaatttctgcaagggtctgtaatatgttttgtaaattctaaaagccatttttggttacaaccattagcagatgccaaaataggtatgttagatgatgctacagtgccctgttggaactacatagatgacaatttaagaaatgcattggatggaaatttagtttctatggatgtaaagcatagaccattggtacaactaaaatgccctccattattaattacatctaacattaatgctggtacagattctaggtggccttatttacataatagattggtggtgtttacatttcctaatgagtttccatttgacgaaaacggaaatccagtgtatgagcttaatgataagaactggaaatcctttttctcaaggacgtggtccagattaagtttgcacgaggacgaggacaaggaaaacgatggagactctttgccaacgtttaaatgtgtgtcaggacaaaatactaacacattatgaaaatgatagtacagacctacgtgaccatatagactattggaaacacatgcgcctagaatgtgctatttattacaaggccagagaaatgggatttaaacatattaaccaccaggtggtgccaacactggctgtatcaaagaataaagcattacaagcaattgaactgcaactaacgttagaaacaatatataactcacaatatagtaatgaaaagtggacattacaagacgttagccttgaagtgtatttaactgcaccaacaggatgtataaaaaaacatggatatacagtggaagtgcagtttgatggagacatatgcaatacaatgcattatacaaactggacacatatatatatttgtgaagaagcatcagtaactgtggtagagggtcaagttgactattatggtttatattatgttcatgaaggaatacgaacatattttgtgcagtttaaagatgatgcagaaaaatatagtaaaaataaagtatgggaagttcatgcgggtggtcaggtaatattatgtcctacatctgtgtttagcagcaacgaagtatcctctcctgaaattattaggcagcacttggccaaccactccgccgcgacccataccaaagccgtcgccttgggcaccgaagaaacacagacgactatccagcgaccaagatcagagccagacaccggaaacccctgccacaccactaagttgttgcacagagactcagtggacagtgctccaatcctcactgcatttaacagctcacacaaaggacggattaactgtaatagtaacactacacccatagtacatttaaaaggtgatgctaatactttaaaatgtttaagatatagatttaaaaagcattgtacattgtatactgcagtgtcgtctacatggcattggacaggacataatgtaaaacataaaagtgcaattgttacacttacatatgatagtgaatggcaacgtgaccaatttttgtctcaagttaaaataccaaaaactattacagtgtctactggatttatgtctatatgacaaatcttgatactgcatccacaacattactggcgtgctttttgctttgcttttgtgtgcttttgtgtgtctgcctattaatacgtccgctgcttttgtctgtgtctacatacacatcattaatactattggtattactattgtggataacagcagcctctgcgtttaggtgttttattgtatatattatatttgtttatataccattatttttaatacatacacatgcacgctttttaattacataatgtatatgtacataatgtaattgttacatataattgttgtataccataacttactattttttcttttttattttcatatataatttttttttttgtttgtttgtttgttttttaataaactgttatcacttaacaatgcgacacaaacgttctgcaaaacgcacaaaacgtgcatcggctacccaactttataaaacatgcaaacaggcaggtacatgtccacctgacattatacctaaggttgaaggcaaaactattgctgatcaaatattacaatatggaagtatgggtgtattttttggtgggttaggaattggaacagggtcgggtacaggcggacgcactgggtatattccattgggaacaaggcctcccacagctacagatacacttgctcctgtaagaccccctttaacagtagatcctgtgggcccttctgatccttctatagtttctttagtggaagaaactagttttattgatgctggtgcaccaacatctgtaccttccattcccccagatgtatcaggatttagtattactacttcaactgataccacacctgctatattagatattaataatactgttactactgttactacacataataatcccactttcactgacccatctgtattgcagcctccaacacctgcagaaactggagggcattttacactttcatcatccactattagtacacataattatgaagaaattcctatggatacatttattgttagcacaaaccctaacacagtaactagtagcacacccataccagggtctcgcccagtggcacgcctaggattatatagtcgcacaacacaacaagttaaagttgtagaccctgcttttgtaaccactcccactaaacttattacatatgataatcctgcatatgaaggtatagatgtggataatacattatatttttctagtaatgataatagtattaatatagctccagatcctgactttttggatatagttgctttacataggccagcattaacctctaggcgtactggcattaggtacagtagaattggtaataaacaaacactacgtactcgtagtggaaaatctataggtgctaaggtacattattattatgatttaagtactattgatcctgcagaagaaatagaattacaaactataacaccttctacatatactaccacttcacatgcagcctcacctacttctattaataatggattatatgatatttatgcagatgactttattacagatacttctacaaccccggtaccatctgtaccctctacatctttatcaggttatattcctgcaaatacaacaattccttttggtggtgcatacaatattcctttagtatcaggtcctgatatacccattaatataactgaccaagctccttcattaattcctatagttccagggtctccacaatatacaattattgctgatgcaggtgacttttatttacatcctagttattacatgttacgaaaacgacgtaaacgtttaccatattttttttcagatgtctctttggctgcctagtgaggccactgtctacttgcctcctgtcccagtatctaaggttgtaagcacggatgaatatgttgcacgcacaaacatatattatcatgcaggaacatccagactacttgcagttggacatccctattttcctattaaaaaacctaacaataacaaaatattagttcctaaagtatcaggattacaatacagggtatttagaatacatttacctgaccccaataagtttggttttcctgacacctcattttataatccagatacacagcggctggtttgggcctgtgtaggtgttgaggtaggtcgtggtcagccattaggtgtgggcattagtggccatcctttattaaataaattggatgacacagaaaatgctagtgcttatgcagcaaatgcaggtgtggataatagagaatgtatatctatggattacaaacaaacacaattgtgtttaattggttgcaaaccacctataggggaacactggggcaaaggatccccatgtaccaatgttgcagtaaatccaggtgattgtccaccattagagttaataaacacagttattcaggatggtgatatggttgatactggctttggtgctatggactttactacattacaggctaacaaaagtgaagttccactggatatttgtacatctatttgcaaatatccagattatattaaaatggtgtcagaaccatatggcgacagcttatttttttatttacgaagggaacaaatgtttgttagacatttatttaatagggctggtgctgttggtgaaaatgtaccagacgatttatacattaaaggctctgggtctactgcaaatttagccagttcaaattattttcctacacctagtggttctatggttacctctgatgcccaaatattcaataaaccttattggttacaacgagcacagggccacaataatggcatttgttggggtaaccaactatttgttactgttgttgatactacacgcagtacaaatatgtcattatgtgctgccatatctacttcagaaactacatataaaaatactaactttaaggagtacctacgacatggggaggaatatgatttacagtttatttttcaactgtgcaaaataaccttaactgcagacgttatgacatacatacattctatgaattccactattttggaggactggaattttggtctacaacctcccccaggaggcacactagaagatacttataggtttgtaacatcccaggcaattgcttgtcaaaaacatacacctccagcacctaaagaagatccccttaaaaaatacactttttgggaagtaaatttaaaggaaaagttttctgcagacctagatcagtttcctttaggacgcaaatttttactacaagcaggattgaaggccaaaccaaaatttacattaggaaaacgaaaagctacacccaccacctcatctacctctacaactgctaaacgcaaaaaacgtaagctgtaagtattgtatgtatgttgaattagtgttgtttgttgtgtatatgtttgtatgtgcttgtatgtgcttgtaaatattaagttgtatgtgtgtttgtatgtatggtataataaacacgtgtgtatgtgtttttaaatgcttgtgtaactattgtgtcatgcaacataaataaacttattgtttcaacacctactaattgtgttgtggttattcattgtatatgaactatatttgctacatcctgtttttgttttatatatactatattttgtagcgccagcggccattttgtagctccaaccgaattcggttgcatgctttttggcacaaaatgtgtttttttaaatagttctatgtcagcaactatagtttaaacttgtacgtttcctgcttgccatgcgtgccaaatccctgttttcctgacctgcactgcttgccaaccattccattgttttttacactgcactatgtgcaactactgaatcactatgtacattgtgtcatataaaataaatcactatgcgccaacgccttacataccgctgttaggcacatatttttggcttgttttaactaacctaattgcatatttggcataaggtttaaacttctaaggccaactaaatgtcaccctagttcatacatgaactgtgtaaaggttagtcatacattgttcatttgtaaaactgcacatgggtgtgtgcaaaccgttttgggttacacatttacaagcaacttatataataatactaaactacaataattcatgtataaaagtaagggcgtaaccgaaatcggttgaaccgaaaccggttagtataaaagcagacattttatgcaccaaaagagaactgcaatgttccaggacccacaggagcgacccagaaagttaccacagttatgcacagagctgcaaacaactatacatgatataatattagaatgtgtgtactgcaagcaacagttactgcgacgtgaggtatatgactttgcttttcgggatttatgcatagtatatagagatgggaatccatatgctgtatgtgataaatgtttaaagttttattctaaaattagtgagtatagacattattgttatagtgtgtatggaacaacattagaacagcaatacaacaaaccgttgtgtgatttgttaattaggtgtattaactgtcaaaagccactgtgtcctgaagaaaagcaaagacatctggacaaaaagcaaagattccataatataaggggtcggtggaccggtcgatgtatgtcttgttgcagatcatcaagaacacgtagagaaacccagctgtaatcatgcatggagatacacctacattgcatgaatatatgttagatttgcaaccagagacaactgatctctactgttatgagcaattaaatgacagctcagaggaggaggatgaaatagatggtccagctggacaagcagaaccggacagagcccattacaatattgtaaccttttgttgcaagtgtgactctacgcttcggttgtgcgtacaaagcacacacgtagacattcgtactttggaagacctgttaatgggcacactaggaattgtgtgccccatctgttctcagaaaccataatctacc

SEQ ID NO: 82 - DNA, 7906 bp, Homo sapiens
  source 1..7906: mol_type = genomic DNA; note = UNCseq2539
atggctgatcctgcaggtaccaatggggaagagggtacgggatgtaatggatggttctatgtagaggctgtagtggaaaaaaaaacaggggatgctatatcagatgacgagaacgaaaatgacagtgatacaggtgaagatttggtagattttatagtaaatgataatgattatttgacacaggcagaaacagagacagcacatgcgttgtttactgcacaggaagcaaaagaacatagagatgcagtacaggttctaaaacgaaagtatttgggtagtccacttagtgatattagtggatgtgtagacaataatattagtcctagattaaaagccatatgtatagaaaaacaaagtagagctgcaaaaaggagattatttgaaagcgaagacagcgggtatggcaatactgaagtggaaactcagcagatgttacaggtagaagggcgccatgagactgaaacaccatgtagtcagtatagtggtggaagtgggggtggtagcagtcagtatagtagtggaagtgggggagagggtgttagtgaaagacacactatatgcgaaacaccacttacaaatattttaaatgtactaaaaactagtaatgcaaaggcagcaatgctagcaaaatttaaagagttatacggggtgagttttacagaattagtaagaccatttaaaagtaataaatcaacgtgttgcgattggtgtattgctgcatttggacttacacccagtatagctgacagtataaaaacactattacaacaatattgtttatatttacacattcaaagtttagcatgttcatggggaatggttgtgttactattagtaagatataaatgtggaaaaaatagagaaacaattgaaaaattgctgtctaaactattatgtgtgtctccaatgtgtatgatgatagagcctccaaaattgcgtagtacagcagcagcattatattggtataaaacaggtatatcaaatattagtgaagtgtatggagacacgccagaatggatacaaagacaaacagtattacaacatagttttaatgattgtacatttgaattatcacagatggtacaatgggcctacgataatgacatagtagacgatagtgaaattgcatataaatatgcacaattggcagacactaatagtaatgcaagtgcctttctaaaaagtaattcacaggcaaaaattgtaaaggattgtgcaacaatgtgtagacattataaacgagcagaaaaaaaacaaatgagtatgagtcaatggataaaatatagatgtgatagggtagatgatggaggtgattggaagcaaattgttatgtttttaaggtatcaaggtgtagactttatgtcatttttaagtgcattaaaaaaatttctgcaaggcatacctaaaaaaaattgcatattactatatggtgcagctaacacaggtaaatcattatttggtatgagtttaatgaaattcctgcaagggtctgtaatatgttttgtaaattctaaaagccatttttggttacaaccattagcagatgccaaaataggtatgttagatgatgctacagtgccctgttggaactacatagatgacaatttaagaaatgcattggatggaaatttagtttctatggatgtaaagcatagaccattggtacaactaaaatgccctccattattaattacatctaacattaatgctggtacagattccaggtggccttatttacataatcgattggtggtgtttacatttcctaatgagtttccatttgacaaaaacggaaatccagtgtatgagcttaatgataagaactggaaatcctttttctcaaggacgtggtccagattaagtttgcacgaggacgaggacaaggaaaacgatggagactctttgccaacgtttaaatgtgtgtcaggacaaaatactaacacattatgaaaatgatagtacagacctacgtgaccatatagactattggaaacacatgcgcctagaatgtgctatttattacaaggccagagaaatgggatttaaacatattaaccaccaggtggtgccaacactggctgtatcaaagaataaagcattacaagcaattgaactgcaactaacgttagaaacaatatataactcacaatatagtaatgaaaagtggacattacaagacgttagccttgaagtgtatttaactgcaccaacaggatgtataaaaaaacatggatatacagtggaagtgcagtttgatggagacatatgcaatacaatgcattatacaaactggacacatatatatatttgtgaagaaacatcagtaactgtggtagagggtcaagttgactattatggtatatattatgttcatgaaggaatacgaacatattttgtgcagtttaaagatgatgcagaaaaatatagtaaaaataaagtatgggaagttcatgcgggtggtcaggtaatattatgtcctacatctgtgtttagcagcgacgaagtatcctctgctgaaattactaggcagcacttggccaaccactccgccgcgacccataccaaagccgtcgccttgggcaccaaagaaacacagacgactatccagcgaccaagatcagagccagacaccggaaacccctgccacaccaacaagttgttgcacagagactccgtggacagtgctccaatcctcactgcagttaacagctcacacaaaggacggattaactgtaatagtaacactacacccatagtacatttaaaaggtgatgctaatactttaaaatgtttaagatacagatttaaaaagcattgtacattgtatactgcagtgtcgtccacatggcattggacaggacataatgtaaaacataaaagtgcaattgttacacttacatatgatagtgaatggcaacgtgaccaatttttgtctcaagtgaaaataccaaaaactattacagtgtctactggatttatgtgtatatgacaaaccttgatactgcatccacaacattactggcgtgctttttgctttgcttttgtgtgcttttgtgtgtctgcctattaatacgtccgctgcttttgtctgtgtctacatacacatcattaatactattggtattactattgtggataacagcagcctctgcgtttaggtgttttattgtatatattgtatttgtttatataccattatttttaatacatacacatgcacgcttcttaattacataatgtatatgtacataatgtaattgttacatataattgttgtataccataacttactattttttcttttttattttcatatatagtttttttttttgtttatttgtgtgttttttaataaactgttattacttaacaatgcgacacaaacgttctgcaaaacgcacaaaacgtgcatcggctacccaactttataaaacatgcaaacaggcaggtacatgtccacctgacattatacctaaggttgaaggcaaaactattgctgatcaaatattacaatatggaagtatgggtgtattttttggtgggttaggaattggaacagggtctggtacaggcggacgcactgggtacattccattaggaacaaggcctcccacagctacagatacacttgctcctgtaagaccccctttaacagtagatcctgtgggcccttctgatccttctatagtttcgttagtggaagaaactagttttattgatgctggtgcaccaacatctgtaccttccattcccccagatgtatcaggatttagtattactacttcaactgataccacacctgctatattagatattaataatactgttactactgttactacacataataatcccactttcactgacccatctgtattgcagcctccaacacctgcagaaactggagggcattttacactttcatcatccactattagtacacataattatgaagaaattcctatggatacatttattgttagcacaaaccctaacacagtaactagtagcacacccataccggggtctcgcccagtggcacgcctaggattatatagtcgcacaacacaacaagttaaggttgtggaccctgcttttgtaaccgctcccactaaacttattacatatgataatcctgcatatgaaggtatagatgtggataatacattatattttcctagtaatgataatagtattaatatagctccagatcctgactttttggatatagttgctttacataggccagcattaacctctaggcgtactggcattaggtacagtagaattggtaataaacaaacactacgtactcgtagtggaaaatctataggtgctaaggtacattattattatgatttaagtactattgatcctgcagaagaaatagaattacaaactataacaccttctacatatacaaccacttcccatgcagcctcacctacttctattaataatggattatatgatatttatgcagatgactttattacagatactgctacaaccccggtaccagctataccctctacatccttatcaggttatattcctgcaaatacaacaattccttttggtggtgcatacaatattcctttagtatcaggtcctgatatacccattaatacaactgaccaagctccttcattaattcctatagttccagggtctccacaatatacaattattgctgatgcaggtgacttttatttacatcctagttattacatgttacgaaaacgacgtaaacgtttaccatattttttttcagatgtctctttggctgcctagtgaggccactgtctacttgcctcctgtcccagtatctaaagttgtaagcacggatgaatatgttgcacgcacaaacatatattatcatgcaggaacatccagactacttgcagttggacatccctattttcctattaaaaaacctaacaataacaaaatattagttcctaaagtatcaggattacaatacagggtatttagaatacatttacctgaccccaataagtttggttttcctgacacctcattttacaatccagatacacagcggctggtttgggcctgtgtaggtgttgaggtaggtcgtggtcagccattaggtgtgggcattagtggccatcctttattaaataaattggatgacacagaaaatgctagtgcttatgcagcaaatgcaggtgtggataatagagaatgtatatctatggattacaaacaaacacaattgtgtttaattggttgcaaaccacctataggggaacactggggcaaaggatccccatgtaacaatgttgcagtaactccaggtgattgtccaccattagagttaataaacacagttattcaggatggtgatatggttgataccggctttggtgctatggactttactacattacaggctaacaaaagtgaagttccactggatatttgtacatctatttgcaaatatccagattatattaaaatggtgtcagaaccatatggcgacagcttatttttttatttacgaagggaacaaatgtttgttagacatttatttaatagggctggtgctgttggtgaaaatgtaccagacgatttatacattaaaggctctgggtctactgcaaatttagccagttcaaattattttcctacacctagtggttctatggttacctctgatgcccaaatatttaataaaccttattggttacaacgagcacagggccacaataatggcatttgttggggtaaccaactatttgttactgttgttgatactacacgcagtacaaatatgtcattatgtgctgccatatctacttcagaacctacatataaaaatactaactttaaagagtacctacgacatggggaggaatatgatttacagtttatttttcaactgtgcaaaataaccttaactgcagacgttatgtcatacatacattctatgaattccactattttggaggactggaattttggtctacaacctcccccaggaggcacactagaagatacttataggtttgtaacatcccaggcaattgcttgtcaaaaacatacacctccagcacctaaagaagatccccttaaaaaatacactttttgggaagtaaatttaaaagaaaagttttctgcagacctagatcagtttcctttaggacgcaaatttttactacaagcaggattgaaggccaaaccaaaatttacattaggaaaacgaaaagctacacccaccacctcatctacctctacaactgctaaacgcaaaaaacgtaagctgtaagtattgtatgtatgttgaattagtgttgtttgttgtgtatatgtttgtatgtgcttgtatgtgcttgtaaatattacgttgtatgtgtgtttgtatgtatggtataataaacacgtgtgtatgtgtttttaaatgcttgtgtaactattgtgtcatgcaacataaataaacttattgtttcaacacctactaattgtgttgtggttattcattgtatataaactatatttgctacattttgtttttgttttatatatactatattttgtagcgccagcggccattttgtagcttcaaccgaattcggttgcatgctttttggcacaaactgtatttttttaaatagttctatgtcagcaactatggtttaaacttgtacgtttcctgcttgccatgcgtgccaaatccctgttttcctgacctgcactgcttgccaaccattccattgttttttacactgcactatgtgcaactactgaatcactatgtacattgtgtcatataaaataaatcactatgcgccaacgccttacataccgctgttaggcacatatttttggcttgttttaactcacctaattgcatagttggcataaggtttaaacttctaaggccaactaaatgtcaccctagttcatacatgaactgtgtaaaggttagtcatacattgttcatttgtaaaactgcacatgggtgtgtgcaaaccgttttgggttacacatttacaaggaacttatataataatactaaactacaataattcatgtataaaactaagggcgtaaccgaaatcggttgaaccgaaaccggttagtataaaagcagacattttatgcaccaaaagagaactgcaatgtttcaggacccacaggagcgacccagaaagttaccacatttatgcacagagctgcaaacaactatacatgatataatattagaatgtgtgtactgcaagcaacagttactgcgacgtgaggtatatgactttgcttttcgggatttatgcatagtatatagagatgggaatccatatgctgtatgtgataaatgtttaaagttttattctaaaattagtgagtatagacattattgttatagtgtgtatggaacaacattagaacagcaatacaacaaaccgttgtgtgatttgttaattaggtgtattaactgtcaaaagccactgtgtcctgaagaaaagcaaagacatctggacaaaaagcaaagattccataatataaggggtcggtggaccggtcgatgtatgtcttgttgcagatcatcgagaacacgtagagaaacccagctgtaatcatgcatggagatacacctacattgcatgaatatatgttagatttgcaaccagagacaactgatctctactgttatgagcaattaaatgacagctcagaggaggaggatgaaatagatggtccagctggacaagcagaaccggacagagcccattacaatattgtaaccttctgttgcaagtgtgactctacgcttcggttgtgcgtacaaagcacacacgtagacatccgtacgttggaagacctgttaatgggcacactaggaattgtgtgccccatctgttctcagaaaccataatctacc

SEQ ID NO: 83 - DNA, 7906 bp, Homo sapiens
  source 1..7906: mol_type = genomic DNA; note = UNCseq2554
atggctgatcctgcaggtaccaatggggaagagggtacgggatgtaatggatggttttatgtagaggctgtagtggaaaaaaaaacaggggatgctatatcagatgacgagaacgaaaatgacagtgatacaggtgaagatttggtagattttatagtaaatgataatgattatttaacacaggcagaaacagagacagcacatgcgttgtttactgcacaggaagcaaaagaacatagagatgcagtacaggttctaaaacgaaagtatttgggtagtccacttagtgatattagtggatgtgtagacaataatattagtcctagattaaaagccatatgtatagaaaaacaaagtagagctgcaaaaaggagattatttgaaagcgaagacagcgggtatggcaatactgaagtggaaactcagcagatgttacaggtagaagggcgccatgagactgaaacaccatgtagtcagtatagtggtggaagtgggggtggttgcagtcagtatagtagtggaagtgggggagagggtgttagtgaaagacatactatatgcgaaacaccacttacaaatattttaaatgtactaaaaactagtaatgcaaaggcagcaatgctagcaaaatttaaagagttatacggggtgagtttttcagaattagtaagaccatttaaaagtaataaatcaacgtgttgcgattggtgtattgctgcatttggacttacacccagtatagctgacagtataaaaacactattacaacaatattgtttatatttacacattcaaagtttagcatgttcatggggaatggttgtgttactattagtaagatataaatgtggaaaaaatagagaaacaattgaaaaattgctgtctaaactattatgtgtgtctccaatgtgtatgatgatagagcctccaaaattgcgtagtacagcagcagcattatattggtataaaacaggtatgtcaaatattagtgaagtgtatggagacacgccagaatggatacaaagacaaacagtattacaacatagttttaatgattgtacatttgaattatcacagatggtacaatgggcctacgataatgacatagtagacgatagtgaaattgcatataaatatgcacaattggcagacactaatagtaatgcaagtgcctttttaaaaagtaattcacaggcaaaaattgtaaaggattgtgcaacaatgtgtagacattataaacgagcagaaaaaaaacaaatgagtatgagtcaatggataaaatatagatgtgatagggtagatgatggaggtgattggaagcaaattgttatgtttttaaggtatcaaggtgtagagtttatgtcatttttaagtgcattaaaaaaatttttgcaaggcatacctaaaaaaaattgcatattactatatggtgcagctaacacaggtaaatcattatttggtatgagtttaatgaaatttctgcaagggtccgtaatatgttttgtaaattctaaaagccatttttggttacaaccattagcagatgccaaaataggtatgttagatgatgctacagtgccctgttggaactacatagatgacaatttaagaaatgcattggatggaaatttagtttctatggatgtaaagcatagaccattggtacaactaaaatgccctccattattaattacatctaacattaatgctggtacagattccaggtggccttatttacataatcgattggtggtgtttacatttccaaatgagtttccatttgacgaaaacggaaatccagtgtatgagcttaatgataagaactggaaatcctttttctcaaggacgtggtccagattaagtttgcacgaggacgaggacaaggaaaacgatggagactctttgccaacgtttaaatgtgtgtcaggacaaaatactaacacattatgaaaatgatagtacagacctacgtgaccatatagactattggaaacacatgcgcctagaatgtgctatttattacaaggccagagaaatgggatttaaacatattaaccaccaggtggtgccaacactggctgtatcaaagaataaagcattacaagcaattgaactgcaactaacgttagaaacaatatataactcacaatatagtaatgaaaagtggacattacaagacgttagccttgaagtgtatttaactgcaccaacaggatgtataaaaaaacatggatatacagtggaagtgcagtttgatggagacatatgcaatacaatgcattatacaaactggacatatatatatatttgtgaagaagcatcagtaactgtggtagagggtcaagttgactattatggtttatattatgttcatgaaggaatacaaacatattttgtgcagtttaaagatgatgcagaaaaatatagtaaaaataaagtatgggaagttcatgcgggtggtcaggtaatattatgtcctacatctgtgtttagcagcgacgaagtatcctctgctgaaattattaggcagcacttggccaaccactccgccgcgacccataccaaaaccgtcgccttgggcaccaaagaaacacagacgactatccagcgaccaagatcagagccagacaccggaaacccctgccacaccaccaagttgttgcacagagactccgtggacagtgctccaatcctcactgcatttaacagctcacacaaaggacggattaactgtaatagtaacactacacccatagtacatttaaaaggtgatgctaatactttaaaatgtttaagatatagatttaaaaagcattgtacattgtatacagcagtgtcgtccacatggcattggacaggacataatgtaaaacataaaagtgcaattgttacacttacatatgatagtgaatggcaacgtgaccaatttttgtctcaagtgaaaataccaaaaactattacagtgtctactggatttatgtctatatgacaaaccttgatactgcatccacaacattactggcgtgctttttgctttgcttttgtgtgcttttgtgtgtctgcctattaatacgtccgctgcttttgtctgtgtctacatacacatcattaatactattggtattattattgtggataacagcagcctctgcgtttaggtgttttattgtatatattgtatttgtttatataccattatttttaatacatacacatgcacgcttcttaattacataatgtatatgtacataatgtaattgttacatataattgttgtataccatcacttactatttttttttttgtagttttatatatagtttttttttttatttgtttgtttgttttttaataaactgttattacttaacaatgcgacacaaacgttctgcaaaacgcacaaaacgtgcatcggccacccaactttataaaacatgcaaacaggcaggtacatgtccacctgacattatacctaaggttgaaggcaaaactattgctgatcaaatattacaatatggaagtatgggtgtattttttggtgggttaggaattggaacagggtcgggtacaggcggacgcactgggtatattccattgggaacaaggcctcccacagctacagatacacttgctcctgtaagaccccctttaacggtagatcctgtgggcccttctgatccgtctatagtttctttagtggaagaaactagttttattgatgctggtgcaccaacacctgtaccttccattcccccagatgtatcaggatttagtattactacttcaactgataccacacctgctatattagatattaataatactgttacaactgttactacacataataatcccacttttactgacccatccgtattgcagcctccaacacctgcagaaactggagggcattttacactttcatcatccactattagtacacataattatgaagaaattcctatggatacatttattgttagcacaaaccctaacacagtaactagtagcacacccataccggggtctcgcccagtggcacgcctaggattatatagtcgcacaacacaacaggttaaagttgtagaccctgcttttgtaaccactcccactaaacttattacatatgataatcctgcatatgaaggtatagatgtggataatacattatattttcctagtaatgataatagtattaatatagctccagatcctgactttttggatatagttgctttacataggccagcattaacctctaggcgtactggcattaggtacagtagaattggtaataaacaaacactacgtactcgtagtggaaaatctataggtgctaaggtacattattattatgatttaagtactattgatcctgcagaagaaatagaattacaaactataacaccttctacatatactaccccttcacatgcagcctcacccacttctattaataatggattatatgatatttatgcagatgactttattacagatacttctacaaccccggtaccatctacaccctctacatccttatcaggttatattcctgcaaatacaacaattccttttggtggtgcatacaatattcctttagtatcaggtcctgatatacccattaatacaactgaccaagccccttcattaattcctatagttccagggtctccacaatatacaattattgctgatgcaggtgacttttatttacatcctagttattacatgttacgaaaacgacgtaaacgtttaccatattttttttcagatgtctctttggctgcctagtgaggccactgtctacttgcctcctgtcccagtatctaaggttgtaagcacggatgaatatgttgcacgcacaaacatatattatcatgcaggaacatccagactacttgcagttggacatccctattttcctattaaaaaacctaacaataacaaaatattagttcctaaagtatcaggattacaatacagggtatttagaatacatttacctgaccccaataagtttggttttcctgacacctcattttataatccagatacacagcggctggtttgggcctgtgtaggtgttgaggtaggtcgtggtcagccattaggtgtgggcattagtggccatcctttattaaataaattggatgacacagaaaatgctagtgcttatgcagcaaatgcaggtgtggataatagagaatgtatatctatggattacaaacaaacacaattgtgtttaattggttgcaaaccacctataggggaacactggggcaaaggatccccatgtaccaatgttgcagtaaatccaggtgattgtccaccattagagttaataaacacagttattcaggatggtgatatggttgataccggctttggtgctatggactttactacattacaggctaacaaaagtgaagttccactggatatttgtacgtctatttgcaaatatccagattatattaaaatggtgtcagaaccatatggcgacagcttatttttttatttacgaagggaacaaatgtttgttagacatttatttaatagggctggtgctgttggtgaaaatgtaccagacgatttatacattaaaggctctgggcctactgcaaatttagccagttcaaattattttcctacacctagtggttctatggttacctctgatgcccaaatattcaataaaccttattggttacaacgagcacagggccacaataatggcatttgttggggtaaccaactatttgttactgttgttgatactacacgcagtacaaatatgtcattatgtgctgccatatctacttcagaacctacatataaaaatactaactttaaggagtacctacgacatggggaggaatatgatttacagtttatttttcaactgtgcaaaataaccttaactgcagacgttatgacatacatacattctatgaattccactattttggaggactggaattttggtctacaacctcccccaggaggcacactagaagatacttataggtttgtaacatcccaggcaattgcttgtcaaaaacatacacctccagcacctaaagaagatccccttaaaaaatacactttttgggaagtaaatttaaaagaaaagttttctgcagacctagatcagtttcctttaggacgcaaatttttactacaagcaggattgaaggccaaaccaaaatttacattaggaaaacgaaaagctacacccaccacctcatctacctctacaactgctaaacgcaaaaaacgtaagctgtaagtattgtatgtatgttgaattagtgttgtttgttgtgtatatgtttgtatgtgcttgtatgtgcttgtaaatattacgttgtatgtgtgtttgtatgtatggtataataaacacgtgtgtatgtggttttaaatgcttgtgtaactattgtgtcatgcaacataaataaacttattgtttcaacacctactaattgtgttgtggttattcattgtctataaactatatttgctacatcctgtttttgttttatatatactatattttgtagcgccagcggccattttgtagcttcaaccgaattcggttgcatgctttttggcacaaactgtgtttttttaaatagttctatgtcagcaactatggtttaaacttgtacgtttcctgcttgccatgcgtgccaaatccctgttttcctgacctgcactgcttgccaaccattccattgttttttacactgcactatgtgcaactactgaatcactatgtacattgtgtcatataaaataaatcactatgcgccaacgccttacataccgctgttaggcacatatttttggcttgttttaactaacctaattgcatatttggcataaggtttaaacttttaaggccaactaaatgtcaccttagttcatacatgaactgtgtaaaggttagtcatacattgttcatttgtaaagctgcacatgggtgtgtgcaaaccgttttaggttacacatttacaagcaacttatataataatactaaactacaataattcatgtataaaactaagggcgtaaccgaaatcggttgaaccgaaaccggttagtataaaagcagacattttatgcaccaaaagagaactgcaatgttccaggacccacaggagcgacccagaaagttaccagagttatgcacagagctgcaaacaactatacatgatataatattagaatgtgtgtactgcaagcaacagttactgcgacgtgaggtatatgactttgcttttcgggatttatgcatagtatatagagatgggaatccatatgctgtatgtgataaatgtttaaagttttattctaaaattagtgagtatagacattattgttatagtttgtatggaacaacattagaacagcaatacaacaaaccgttgtgtgatttgttgattaggtgtattaactgtcaaaagccactgtgtcctgaagaaaagcaaagacatctggacaaaaagcaaagattccataatataaggggtcggtggaccggtcgatgtatgtcttgttgcagatcatcaagaacacgtagagaaacccagctgtaatcatgcatggagatacacctacattgcatgaatatatgttagatttgcaaccagagacaactgatctctactgttatgagcaattaagtgacagctcagaggaggaggatgaaatagatggtccagctggacaagcagaaccggacagagcccattacaatattgtaaccttttgttgcaagtgtgactctacgcttcggttgtgcgtacaaagcacacacgtagacatccgtacgttggaagacctgttaatgggcacactaggaattgtgtgccccatctgttctcagaaaccataatctacc

SEQ ID NO: 84 - DNA, 7906 bp, Homo sapiens
  source 1..7906: mol_type = genomic DNA; note = UNCseq2576
atggctgatcctgcaggtaccaatggggaagagggtacgggatgtaatggatggttttatgtagaggctgtagtggaaaaaaaaacaggggatgctatatcagatgacgagaacgaaaatgacagtgatacaggtgaagatttggtagattttatagtaaatgataatgattatttaacacaggcagaaacagagacagcacatgcgttgtttactgcacaggaagcaaaacaacatagagatgcagtacaggttctaaaacgaaagtatttgggtagtccacttagtgatattagtggatgtgtagacaataatattagtcctagattaaaagctatatgtatagaaaaacaaagtagagctgcaaaaaggagattatttgaaagcgaagacagcgggtatggcaatactgaagtggaaactcagcagatgttacaggtagaagggcgccatgagactgaaacaccatgtagtcagtatagtggtggaagtgggggtggttgcagtcagtacagtagtggaagtgggggagagggtgttagtgaaagacacactatatgccaaacaccacttacaaatattttaaatgtactaaaaactagtaatgcaaaggcagcaatgttagcaaaatttaaagagttatacggggtgagtttttcagaattagtaagaccatttaaaagtaataaatcaacgtgttgcgattggtgtattgctgcatttggacttacacccagtatagctgacagtataaaaacactattacaacaatattgtttatatttacacattcaaagtttagcatgttcatggggaatggttgtgttactattagtaagatataaatgtggaaaaaatagagaaacaattgaaaaattgctgtctaaactattatgtgtgtctccaatgtgtatgatgatagagcctccaaaattgcgtagtacagcagcagcattatattggtataaaacaggtatatcaaatattagtgaagtgtatggagacacgccagaatggatacaaagacaaacagtattacaacatagttttaatgattgtacatttgaattatcacagatggtacaatgggcctacgataatgacatagtagacgatagtgaaattgcatataaatatgcacaattggcagacactaatagtaatgcaagtgcctttctaaaaagtaattcacaggcaaaaattgtaaaggattgtgcaacaatgtgtagacattataaacgagcagaaaaaaaacaaatgagtatgagtcaatggataaaatatagatgtgatagggtagatgatggaggtgattggaagcaaattgttatgtttttaaggtatcaaggtgtagagtttatgtcatttttaactgcattaaaaagatttttgcaaggcatacctaaaaaaaattgcatattactatatggtgcagctaacacaggtaaatcattatttggtatgagtttaatgaaatttctgcaagggtctgtaatatgttttgtaaattctaaaagccatttttggttacaaccattagcagatgccaaaataggtatgttagatgatgctacagtgccctgttggaactacatagatgacaatttaagaaatgcattggatggaaatttagtttctatggatgtaaagcatagaccattggtacaactaaaatgccctccattattaattacatctaacattaatgctggtacagattctaggtggccttatttacataatagattggtggtgtttacatttcctaatgagtttccatttgacgaaaacggaaatccagtgtatgagcttaatgataagaactggaaatcctttttctcaaggacgtggtccagattaagtttgcacgaggacgaggacaaggaaaacgatggagactctttgccaacgtttaaatgtgtgtcaggacaaaatactaacacattatgaaaatgatagtacagacctacgtgaccatatagactattggaaacacatgcgcctagaatgtgctatttattacaaggccagagaaatgggatttaaacatattaaccaccaggtggtgccaacgctggctgtatcaaagaataaagcattacaagcaattgaactgcaactaacgttagaaacaatatataactcacaatatagtaatgaaaagtggacattacaagacgttagccttgaagtgtatttaactgcaccaacaggatgtataaaaaaacatggatatacagtggaagtgcagtttgatggagacatatgcaatacaatgcattatacaaactggacacatatatatatttgtgaagaagcatcagtaactgtggtagagggtcaagttgactattatggtttatattatgttcatgaaggaatacgaacatattttgtgcagtttaaagatgatgcagaaaaatatagtaaaaataaagtatgggaagttcatgcgggtggtcaggtaatattatgtcctacatctgtgtttagcagcaacgaagtatcctctcctgaaactattaggcagcacctggccaaccactccgccgcgacccataccaaagccgtcgccttgggcaccgaagaaacacagacgactatccagcgaccaagatcagagccagacaccggaaacccctgccacaccactaagttgttgcacagagactcagtggacagtgctccaatcctcactgcatttaacagctcacacaaaggacggattaactgtaatagtaacactacacccatagtacatttaaaaggtgatgctaatactttaaaatgtttaagatatagatttaaaaagcattgtacattgtatactgcagtgtcgtctacatggcattggacaggacataatgtaaaacataaaagtgcaattgttacacttacatatgatagtgaatggcaacgtgaccaatttttgtctcaagttaaaataccaaaaactattacagtgtctactggatttatgtctatatgacaaatcttgatactgcatccacaacattactggcgtgctttttgctttgcttttgtgtgcttttgtgtgtctgcctattaatacgtccgctgcttttgtctgtgtctacatacacatcattaatactattggtattactattgtggataacagcagcctctgcgtttaggtgttttattgtatatattgtatttgtttatataccattatttttaatacatacacatgcacgctttttaattacataatgtatatgtacataatgtaattgttacatataattgttgtataccataacttactactttttcttttttatttttatatataattttttttttggtttgtttgtttgttttttaataaactgttatcacttaacaatgcgacacaaacgttctgcaaaacgcacaaaacgtgcatcggctacccaactttataaaacatgcaaacaggcaggtacatgtccacctgacattatacctaaggttgaaggcaaaactattgctgatcaaatattacaatatggaagtatgggtgtattttttggtgggttaggaattggaacagggtcgggtacaggcggacgcactgggtatattccattgggaacaaggcctcccacagctacagatacacttgctcctgtaagaccccctttaacagtagatcctgtgggcccttctgatccttctatagtttctttagtggaagaaactagttttattgatgctggtgcaccaacatctgtaccttccattcccccagatgtatcaggatttagtattactacttcaactgataccacacctgctatattagatattaataatactgttactactgttactacacataataatcccactttcactgacccatctgtattgcagcctccaacacctgcagaaactggagggcattttacactttcatcatccactattagtacacataattatgaagaaattcctatggatacatttattgttagcacaaaccctaacacagtaactagtagcacacccataccagggtctcgcccagtggcacgcctaggattatatagtcgcacaacacaacaggttaaagttgtagaccctgcttttgtaaccactcccactaaacttattacatatgataatcctgcatatgaaggtatagatgtggataatacattatattttgctagtaatgataatagtattaatatagctccagatcctgactttttggatatagttgctttacataggccagcattaacctctaggcgtactggcattaggtacagtagaattggtaataaacaaacactacgtactcgtagtggaaaatctataggtgctaaggtacattattattatgatttaagtactattgatcctgcagaagaaatagaattacaaactataacaccttctacatatactaccacttcacatgcagcctcacctacttctattaataatggattatatgatatttatgcagatgactttattacagatacttctacaaccccggtaccatctgtaccctctacatctttatcgggttatattcctgcaaatacaacaattccttttggtggtgcatacaatattcctttagtatcaggtcctgatatacccattaatataactgaccaagctccttcattaattcctatagttccagggtctccacaatatacaattattgctgatgcaggtgacttttatttacatcctagttattacatgttacgaaaacgacgtaaacgtttaccatattttttttcagatgtctctttggctgcctagtgaggccactgtctacttgcctcctgtcccagtatctaaggttgtaagcacggatgaatatgttgcacgcacaaacatatattatcatgcaggaacatccagactacttgcagttggacatccctattttcctattaaaaaacctaacaataacaaaatattagttcctaaagtatcaggattacaatacagggtatttagaatacatttacctgaccccaataagtttggttttcctgacacctcattttataatccagatacacagcggctggtttgggcctgtgtaggtgttgaggtaggtcgtggtcagccattaggtgtgggcattagtggccatcctttattaaataaattggatgacacagaaaatgctagtgcttatgcagcaaatgcaggtgtggataatagagaatgtatatctatggattacaaacaaacacaattgtgtttaattggttgcaaaccacctataggggaacactggggcaaaggatccccatgtaccaatgttgcagtaaatccaggtgattgtccaccattagagttaataaacacagttattcaggatggtgatatggttgatactggctttggtgctatggactttactacattacaggctaacaaaagtgaagttccactggatatttgtacatctatttgcaaatatccagattatattaaaatggtgtcagaaccatatggcgacagcttatttttttatttacgaagggaacaaatgtttgttagacatttatttaatagggctggtgctgttggtgaaaatgtaccagacgatttatacattaaaggctctgggtctactgcaaatttagccagttcaaattattttcctacacctagtggttctatggttacctctgatgcccaaatattcaataaaccttattggttacaacgagcacagggccacaataatggcatttgttggggtaaccaactatttgttactgttgttgatactacacgcagtacaaatatgtcattatgtgctgccatatctacttcagaaactacatataaaaatactaactttaaggagtacctacgacatggggaggaatatgatttacagtttatttttcaactgtgcaaaataaccttaactgcagacgttatgacatacatacattctatgaattccactattttggaggactggaattttggtctacaaccccccccaggaggcacactagaagatacttataggtttgtaacatcccaggcaattgcttgtcaaaaacatacacctccagcacctaaagaagatccccttaaaaaatacactttttgggaagtaaatttaaaggaaaagttttctgcagacctagatcagtttcctttaggacgcaaatttttactacaagcaggattgaaggccaaaccaaaatttacattaggaaaacgaaaagctacacccaccacctcatctacctctacaactgctaaacgcaaaaaacgtaagctgtaagtattgtatgtatgttgcattagtgttgtttgttgtgtatatgtttgtatgtgcttgtatgtgcttgtaaatattaagttgtatgtgtgtttgtatgtatggtataataaacacgtgtgtatgtgtttttaaatgcttgtgtaactattgtgtcatgcaacataaataaacttattgtttcaacacctactaattgtgttgtggttattcattgtatataaactatatttgctacatcctgtttttgttgtatatatactatattttgtagcgccagcggccattttgtagcttcaaccgaattcggttgcatgctttttggcacaaaatgtgtttttttaaatagttctatgtcagcaactatggtttaaacttgtacgtttcctgcttgccatgcgtgccaaatccctgttttcctgacctgcactgcttgccaaccattccattgttttttacactgcactatgtgcaactactgaatcactatgtacattgtgtcatataaaataaatcactatgcgccaacgccttacataccgctgttaggcacatatttttggcttgttttaactaacctaattgcatatttggcataaggtttaaacttctaaggccaactaaatgtcaccctagttcatacatgaactgtgtaaaggttagtcatacattgttcatttgtaaaactgcacatgggtgtgtgcaaaccgttttgggttacacatttacaagcaacttatataataatactaaactacaataatccatgtataaaactaagggcgtaaccgaaatcggttgaaccgaaaccggttagtataaaagcagacattttatgcaccaaaagagaactgcaatgtttcaggacccacaggagcgacccggaaagttaccacagttatgcacagagctgcaaacaactatacatgatataatattagaatgtgtgtactgcaagcaacagttactgcgacgtgaggtatatgactttgcttttcgggatttatgcatagtatatagagatgggaatccatatgctgtatgtgataaatgtttaaagttttattctaaaattagtgagtatagacattattgttatagtttgtatggaacaacattagaacagcaatacaacaaaccgttgtgtgatttgttaattaggtgtattaactgtcaaaagccactgtgtcctgaagaaaagcaaagacatctggacaaaaagcaaagattccataatataaggggtcggtggaccggtcgatgtatgtcttgttgcagatcatcaagaacacgtagagaaacccagctgtaatcatgcatggagatacacctacattgcatgaatatatgttagatttgcaaccagagacaactgatctctactgttatgagcaattaaatgacagctcagaggaggaggatgaaatagatggtccagctggacaagcagaaccggacagagcccattacaatattgtaaccttttgttgcaagtgtgactctacgcttcggttgtgcgtacaaagcacacacgtagacattcgtactttggaagacctgttaatgggcacactaggaattgtgtgccccatctgttctcagaaaccataatctacc

SEQ ID NO: 85 - DNA, 7906 bp, Homo sapiens
  source 1..7906: mol_type = genomic DNA; note = UNCseq2594
atggctgatcctgcaggtaccaatggggaagagggtacgggatgtaatggatggttttatgtagaggctgtagtggaaaaaaaaacaggggatgctatatcagatgacgagaacgaaaatgacagtgatacaggtgaagatttggtagattttatagtaaatgataatgattatttaacacaggcagaaacagagacagcacatgcgttgtttactgcacaggaagcaaaacaacatagagatgcagtacaggttctaaaacgaaagtatttgggtagtccacttagtgatattagtggatgtgtagacaataatattagtcctagattaaaagctatatgtatagaaaaacaaagtagagctgcaaaaaggagattatttgaaagcgaagacagcgggtatggcaatactgaagtggaaactcagcagatgttacaggtagaagggcgccatgagactgaaacaccatgtagtcagtatagtggtggaagtgggggtggttgcagtcagtacagtagtggaagtgggggagagggtgttagtgaaagacacactatatgccaaacaccacttacaaatattttaaatgtactaaaaactagtaatgcaaaggcagcaatgttagcaaaatttaaagagttatacggggtgagtttttcagaattagtaagaccatttaaaagtaataaatcaacgtgttgcgattggtgtattgctgcatttggacttacacccagtatagctgacagtataaaaacactattacaacaatattgtttatatttacacattcaaagtttagcatgttcatggggaatggttgtgttactattagtaagatataaatgtggaaaaaatagagaaacaattgaaaaattgctgtctaaactattatgtgtgtctccaatgtgtatgatgatagagcctccaaaattgcgtagtacagcagcagcattatattggtataaaacaggtatatcaaatattagtgaagtgtatggagacacgccagaatggatacaaagacaaacagtattacaacatagttttaatgattgtacatttgaattatcacagatggtacaatgggcctacgataatgacatagtagacgatagtgaaattgcatataaatatgcacaattggcagacactaatagtaatgcaagtgcctttctaaaaagtaattcacaggcaaaaattgtaaaggattgtgcaacaatgtgtagacattataaacgagcagaaaaaaaacaaatgagtatgagtcaatggataaaatatagatgtgatagggtagatgatggaggtgattggaagcaaattgttatgtttttaaggtatcaaggtgtagagtttatgtcatttttaactgcattaaaaagatttttgcaaggcatacctaaaaaaaattgcatattactatatggtgcagctaacacaggtaaatcattatttggtatgagtttaatgaaatttctgcaagggtctgtaatatgttttgtaaattctaaaagccatttttggttacaaccattagcagatgccaaaataggtatgttagatgatgctacagtgccctgttggaactacatagatgacaatttaagaaatgcattggatggaaatttagtttctatggatgtaaagcatagaccattggtacaactaaaatgccctccattattaattacatctaacattaatgctggtacagattctaggtggccttatttacataatagattggtggtgtttacatttcctaatgagtttccatttgacgaaaacggaaatccagtgtatgagcttaatgataagaactggaaatcctttttctcaaggacgtggtccagattaagtttgcacgaggacgaggacaaggaaaacgatggagactctttgccaacgtttaaatgtgtgtcaggacaaaatactaacacattatgaaaatgatagtacagacctacgtgaccatatagactattggaaacacatgcgcctagaatgtgctatttattacaaggccagagaaatgggatttaaacatattaaccaccaggtggtgccaacactggctgtatcaaagaataaagcattacaagcaattgaactgcaactaacgttagaaacaatatataactcacaatatagtaatgaaaagtggacattacaagacgttagccttgaagtgtatttaactgcaccaacaggatgtataaaaaaacatggatatacagtggaagtgcagtttgatggagacatatgcaatacaatgcattatacaaactggacacatatatatatttgtgaagaagcatcagtaactgtggtagagggtcaagttgactattatggtttatattatgttcatgaaggaatacgaacatattttgtgcagtttaaagatgatgcagaaaaatatagtaaaaataaagtatgggaagttcatgcgggtggtcaggtaatattatgtcctacatctgtgtttagcagcaacgaagtatcctctcctgaaattattaggcagcacttggccaaccactccgccgcgacccataccaaagccgtcgccttgggcaccgaagaaacacagacgactatccagcgaccaagatcagagccagacaccggaaacccctgccacaccactaagttgttgcacagagactcagtggacagtgctccaatcctcactgcatttaacagctcacacaaaggacggattaactgtaatagtaacactacacccatagtacatttaaaaggtgatgctaatactttaaaatgtttaagatatagatttaaaaagcattgtacattgtatactgcagtgtcgtctacatggcattggacaggacataatgtaaaacataaaagtgcaattgttacacttacatatgatagtgaatggcaacgtgaccaatttttgtctcaagttaaaataccaaaaactattacagtgtctactggatttatgtctatatgacaaatcttgatactgcatccacaacattactggcgtgctttttgctttgcttttgtgtgcttttgtgtgtctgcctattaatacgtccgctgcttttgtctgtgtctacatacacatcattaatactattggtattactattgtggataacagcagcctctgcgtttaggtgttttattgtatatattgtatttgtttatataccattatttttaatacatacacatgcacgctttttaattacataatgtatatgtacaaaatgtaattgttacatataattgttgtataccataacttactattttttcttttttattttcatatatattttttttttttgtttgtttgtttgttttttaataaactgttatcacttaacaatgcgacacaaacgttctgcaaaacgcacaaaacgtgcatcggctacccaactttataaaacatgcaaacaggcaggtacatgtccacctgacattatacctaaggttgaaggcaaaactattgctgatcaaatattacaatatggaagtatgggtgtattttttggtgggttaggaattggaacagggtcgggtacaggcggacgcactgggtatattccattgggaacaaggcctcccacagctacagatacacttgctcctgtaagaccccctttaacagtagatcctgtgggcccttctgatccttctatagtttctttagtggaagaaactagttttattgatgctggtgcaccaacatctgtaccttccattcccccagatgtatcaggatttagtattactacttcaactgataccacacctgctatattagatattaataatactgttactactgttactacacataataatcccactttcactgacccatctgtattgcagcctccaacacctgcagaaactggagggcattttacactttcatcatccactattagtacacataattatgaagaaattcctatggatacatttattgttagcacaaaccctaacacagtaactagtagcacacccataccagggtctcgcccagtggcacgcctaggattatatagtcgcacaacacaacaagttaaagttgtagaccctgcttttataaccactcccactaaacttattacatatgataatcctgcatatgaaggtatagatgtggataatacattatatttttctagtaatgataatagtattaatatagctccagatcctgactttttggatatagttgctttacataggccagcattaacctctaggcgtactggcattaggtacagtagaattggtaataaacaaacactacgtactcgtagtggaaaatctataggtgctaaggtacattattattatgatttaagtactattgatcctgcagaagaaatagaattacaaactataacaccttctacatatactaccacttcacatgcagcctcacctacttctattaataatggattatatgatatttatgcagatgactttattacagatacttctacaaccccggtaccatctgtaccctctacatctttatcaggttatattcctgcaaatacaacaattccttttggtggtgcatacaatattcctttagtatcaggtcctgatatacccattaatataactgaccaagctccttcattaattcctatagttccagggtctccacaatatacaattattgctgatgcaggtgacttttatttacatcctagttattacatgttacgaaaacgacgtaaacgtttaccatattttttttcagatgtctctttggctgcctagtgaggccactgtctacttgcctcctgtcccagtatctaaggttgtaagcacggatgaatatgttgcacgcacaaacatatattatcatgcaggaacatccagactacttgcagttggacatccctattttcctattaaaaaacctaacaataacaaaatattagttcctaaagtatcaggattacaatacagggtatttagaatacatttacctgaccccaataagtttggttttcctgacacctcattttataatccagatacacagcggctggtttgggcctgtgtaggtgttgaggtaggccgtggtcagccattaggtgtgggcattagtggccatcctttattaaataaattggatgacacagaaaatgctagtgcttatgcagcaaatgcaggtgtggataatagagaatgtatatctatggattacaaacaaacacaattgtgtttaattggttgcaaaccacctataggggaacactggggcaaaggatccccatgtaccaatgttgcagtaaatccaggtgattgtccaccattagagttaataaacacagttattcaggatggtgatatggttgatactggctttggtgctatggactttactacattacaggctaacaaaagtgaagttccactggatatttgtacatctatttgcaaatatccagattatattaaaatggtgtcagaaccatatggcgacagcttatttttttatttacgaagggaacaaatgtttgttagacatttatttaatagggctggtgctgttggtgaaaatgtaccagacgatttatacattaaaggctctgggtctactgcaaatttagccagttcaaattattttcctacacctagtggttctatggttacctctgatgcccaaatattcaataaaccttattggttacaacgagcacagggccacaataatggcatttgttggggtaaccaactatttgttactgttgttgatactacacgcagtacaaatatgtcattatgtgctgccatatctacttcagaaactacatataaaaatactaactttaaggagtacctacgacatggggaggaatatgatttacagtttatttttcaactgtgcaaaataaccttaactgcagacgttatgacatacatacattctatgaattccactattttggaggactggaattttggtctacaacctcccccaggaggcacactagaagatacttataggtttgtaacatcccaggcaattgcttgtcaaaaacatacacctccagcacctaaagaagatccccttaaaaaatacactttttgggaagtaaatttaaaggaaaagttttctgcagacctagatcagtttcctttaggacgcaaatttttactacaagcaggattgaaggccaaaccaaaatttacattaggaaaacgaaaagctacacccaccacctcatctacctctacaactgctaaacgcaaaaaacgtaagctgtaagtattgtatgtatgttgaattagtgttgtttgttgtttatatgtttgtatgtgcttgtatgtgcttgtaaatattaagttgtatgtgtgtttgtatgtatggtataataaacacgtgtgtatgtgtttttaaatgcttgtgtaactattgtgtcatgcaacataaataaacttattgtttcaacacctactaattgtgttgtggttattcattgtatataaactatatttgctacatcctgtttttgttttatatatactatattttgtagcgccagcggccattttgtagcttcaaccgaattcggttgcatgctttttggcacaaaatgtgtttttttaaatagttctatgtcagcaactatagtttaaacttgtacgtttcctgcttgccatgcgtgccaaatccctgttttcctgacctgcactgcttgccaaccattccattgttttttacactgcactatgtgcaactactgaatcactatgtacattgtgtcatataaaataaatcactatgcgccaacgccttacataccgctgttaggcacatatttttggcttgttttaactaacctaattgcatatttggcataaggtttaaacttctaaggccaactaaatgtcaccctagttcatacatgaactgtgtaaaggttagtcatacattgttcatttgtaaaactgcacatgggtgtgtgcaaaccgttttgggttacacatttacaagcaacttatataataatactaaactacaataattcatgtataaaactaagggcgtaaccgaaatcggttgaaccgaaaccggttagtataaaagcagacattttatgcaccaaaagagaactgcaatgttccaggacccacaggagcgacccagaaagttaccacagttatgcacagagctgcaaacaactatacatgatataatattagaatgtgtgtactgcaagcaacagttactgcgacgtgaggtatatgactttgcttttcgggatttatgcatagtatatagagatgggaatccatatgctgtatgtgataaatgtttaaagttttattctaaaattagtgagtatagacattattgttatagtgtgtatggaacaacattagaacagcaatacaacaaaccgttgtgtgatttgttaattaggtgtattaactgtcaaaagccactgtgtcctgaagaaaagcaaagacatctggacaaaaagcaaagattccataatataaggggtcggtggaccggtcgatgtatgtcttgttgcagatcatcaagaacacgtagagaaacccagctgtaatcatgcatggagatacacctacattgcatgaatatatgttagatttgcaaccagagacaactgatctctactgttatgagcaattaaatgacagctcagaggaggaggatgaaatagatggtccagctggacaagcagaaccggacagagcccattacaatattgtaaccttttgttgcaagtgtgactctacgcttcggttgtgcgtacaaagcacacacgtagacattcgtactttggaagacctgttaatgggcacactaggaattgtgtgccccatctgttctcagaaaccataatctacc

SEQ ID NO: 86 - DNA, 7906 bp, Homo sapiens
  source 1..7906: mol_type = genomic DNA; note = UNCseq2601
atggctgatcctgcaggtaccaatggggaagagggtacgggatgtaatggatggttttatgtagaggctgtagtggaaaaaaaaacaggggatgctatatcagatgacgagaacgaaaatgacagtgatacaggtgaagatttggtagattttatagtaaatgataatgattatttaacacaggcagaaacagagacagcacatgcgttgtttactgcacaggaagcaaaacaacatagagatgcagtacaggttctaaaacgaaagtatttgggtagtccacttagtgatattagtggatgtgtagacaataatattagtcctagattaaaagctatatgtatagaaaaacaaagtagagctgcaaaaaggagattatttgaaagcgaagacagcgggtatggcaatactgaagtggaaactcagcagatgttacaggtagaagggcgccatgagactgaaacaccatgtagtcagtatagtggtggaagtgggggtggttgcagtcagtacagtagtggaagtgggggagagggtgttagtgaaagacacactatatgccaaacaccacttacaaatattttaaatgtactaaaaactagtaatgcaaaggcagcaatgttagcaaaatttaaagagttatacggggtgagtttttcagaattagtaagaccatttaaaagtaataaatcaacgtgttgcgattggtgtattgctgcatttggacttacacccagtatagctgacagtataaaaacactattacaacaatattgtttatatttacacattcaaagtttagcatgttcatggggaatggttgtgttactattagtaagatataaatgtggaaaaaatagagaaacaattgaaaaattgctgtctaaactattatgtgtgtctccaatgtgtatgatgatagagcctccaaaattgcgtagtacagcagcagcattatattggtataaaacaggtatatcaaatattagtgaagtgtatggagacacgccagaatggatacaaagacaaacagtattacaacatagttttaatgattgtacatttgaattatcacagatggtacaatgggcctacgataatgacatagtagacgatagtgaaattgcatataaatatgcacaattggcagacactaatagtaatgcaagtgcctttctaaaaagtaattcacaggcaaaaattgtaaaggattgtgcaacaatgtgtagacattataaacgagcagaaaaaaaacaaatgagtatgagtcaatggataaaatatagatgtgatagggtagatgatggaggtgattggaagcaaattgttatgtttttaaggtatcaaggtgtagagtttatgtcatttttaactgcattaaaaagatttttgcaaggcatacctaaaaaaaattgcatattactatatggtgcagctaacacaggtaaatcattatttggtatgagtttaatgaaatttctgcaagggtctgtaatatgttttgtaaattctaaaagccatttttggttacaaccattagcagatgccaaaataggtatgttagatgatgctacagtgccctgttggaactacatagatgacaatttaagaaatgcattggatggaaatttagtttctatggatgtaaagcatagaccattggtacaactaaaatgccctccattattaattacatctaacattaatgctggtacagattctaggtggccttatttacataatagattggtggtgtttacatttcctaatgagtttccatttgacgaaaacggaaatccagtgtatgagcttaatgataagaactggaaatcctttttctcaaggacgtggtccagattaagtttgcacgaggacgaggacaaggaaaacgatggagactctttgccaacgtttaaatgtgtgtcaggacaaaatactaacacattatgaaaatgatagtacagacctacgtgaccatatagactattggaaacacatgcgcctagaatgtgctatttattacaaggccagagaaatgggatttaaacatattaaccaccaggtggtgccaacactggctgtatcaaagaataaagcattacaagcaattgaactgcaactaacgttagaaacaatatataactcacaatatagtaatgaaaagtggacattacaagacgttagccttgaagtgtatttaactgcaccaacaggatgtataaaaaaacatggatatacagtggaagtgcagtttgatggagacatatgcaatacaatgcattatacaaactggacacatatatatatttgtgaagaagcatcagtaactgtggtagagggtcaagttgactattatggtttatattatgttcatgaaggaatacgaacatattttgtgcagtttaaagatgatgcagaaaaatatagtaaaaataaagtatgggaagttcatgcgggtggtcaggtaatattatgtcctacatctgtgtttagcagcaacgaagtatcctctcctgaaattattaggcagcacttggccaaccactccgccgcgacccataccaaagccgtcgccttgggcaccgaagaaacacagacgactatccagcgaccaagatcagagccagacaccggaaacccctgccacaccactaagttgttgcacagagactcagtggacagtgctccaatcctcactgcatttaacagctcacacaaaggacggattaactgtaatagtaacactacacccatagtacatttaaaaggtgatgctaatactttaaaatgtttaagatatagatttaaaaagcattgtacattgtatactgcagtgtcgtctacatggcattggacaggacataatgtaaaacataaaagtgcaattgttacacttacatatgatagtgaatggcaacgtgaccaatttttgtctcaagttaaaataccaaaaactattacagtgtctactggatttatgtctatatgacaaatcttgatactgcatccacaacattactggcgtgctttttgctttgcttttgtgtgcttttgtgtgtctgcctattaatacgtccgctgcttttgtctgtgtctacatacacatcattaatactattggtattactattgtggataacagcagcctctgcgtttaggtgttttattgtatatattatatttgtttatataccattatttttaatacatacacatgcacgctttttaattacataatgtatatgtacataatgtaattgttacatataattgttgtataccataacttactattttttcttttttattttcatatataatttttttttttgtttgtttgtttgttttttaataaactgttatcacttaacaatgcgacacaaacgttctgcaaaacgcacaaaacgtgcatcggctacccaactttataaaacatgcaaacaggcaggtacatgtccacctgacattatacctaaggttgaaggcaaaactattgctgatcaaatattacaatatggaagtatgggtgtattttttggtgggttaggaattggaacagggtcgggtacaggcggacgcactgggtatattccattgggaacaaggcctcccacagctacagatacacttgctcctgtaagaccccctttaacagtagatcctgtgggcccttctgatccttctatagtttctttagtggaagaaactagttttattgatgctggtgcaccaacatctgtaccttccattcccccagatgtatcaggatttagtattactacttcaactgataccacacctgctatattagatattaataatactgttactactgttactacacataataatcccactttcactgacccatctgtattgcagcctccaacacctgcagaaactggagggcattttacactttcatcatccactattagtacacataattatgaagaaattcctatggatacatttattgttagcacaaaccctaacacagtaactagtagcacacccataccagggtctcgcccagtggcacgcctaggattatatagtcgcacaacacaacaggttaaagttgtagaccctgcttttgtaaccactcccactaaacttattacatatgataatcctgcatatgaaggtatagatgtggataatacattatatttttctagtaatgataatagtattaatatagctccagatcctgactttttggatatagttgctttacataggccagcattaacctctaggcgtactggcattaggtacagtagaattggtaataaacaaacactacgtactcgtagtggaaaatctataggtgctaaggtacattattattatgatttaagtactattgatcctgcagaagaaatagaattacaaactataacaccttctacatatactaccacttcacatgcagcctcacctacttctattaataatggattatatgatatttatgcagatgactttattacagatacttctacaaccccggtaccatctgtaccctctacatctttatcaggttatattcctgcaaatacaacaattccttttggtggtgcatacaatattcctttagtatcaggtcctgatatacccattaatataactgaccaagctccttcattaattcctatagttccagggtctccacaatatacaattattgctgatgcaggtgacttttatttacatcctagttattacatgttacgaaaacgacgtaaacgtttaccatattttttttcagatgtctctttggctgcctagtgaggccactgtctacttgcctcctgtcccagtatctaaggttgtaagcacggatgaatatgttgcacgcacaaacatatattatcatgcaggaacatccagactacttgcagttggacatccctattttcctattaaaaaacctaacaataacaaaatattagttcctaaagtatcaggattacaatacagggtatttagaatacatttacctgaccccaataagtttggttttcctgacacctcattttataatccagatacacagcggctggtttgggcctgtgtaggtgttgaggtaggtcgtggtcagccattaggtgtgggcattagtggccatcctttattaaataaattggatgacacagaaaatgctagtgcttatgcagcaaatgcaggtgtggataatagagaatgtatatctatggattacaaacaaacacaattgtgtttaattggttgcaaaccacctataggggaacactggggcaaaggatccccatgtaccaatgttgcagtaaatccaggtgattgtccaccattagagttaataaacacagttattcaggatggtgatatggttgatactggctttggtgctatggactttactacattacaggctaacaaaagtgaagttccactggatatttgtacatctatttgcaaatatccagattatattaaaatggtgtcagaaccatatggcgacagcttatttttttatttacgaagggaacaaatgtttgttagacatttatttaatagggctggtgctgttggtgaaaatgtaccagacgatttatacattaaaggctctgggtctactgcaaatttagccagttcaaattattttcctacacctagtggttctatggttacctctgatgcccaaatattcaataaaccttattggttacaacgagcacagggccacaataatggcatttgttggggtaaccaactatttgttactgttgttgatactacacgcagtacaaatatgtcattatgtgctgccatatctacttcagaaactacatataaaaatactaactttaaggagtacctacgacatggggaggaatatgatttacagtttatttttcaactgtgcaaaataaccttaactgcagacgttatgacatacatacattctatgaattccactattttggaggactggaattttggtctacaacctcccccaggaggcacactagaagatacttataggtttgtaacatcccaggcaattgcttgtcaaaaacatacacctccagcacctaaagaagatccccttaaaaaatacactttttgggaagtaaatttaaaggaaaagttttctgcagacctagatcagtttcctttaggacgcaaatttttactacaagcaggattgaaggccaaaccaaaatttacattaggaaaacgaaaagctacacccaccacctcatctacctctacaactgctaaacgcaaaaaacgtaagctgtaagtattgtatgtatgttgaattagtgttgtttgttgtgtatatgtttgtatgtgcttgtatgtgcttgtaaatattaagttgtatgtgtgtttgtatgtatggtataataaacacgtgtgtatgtgtttttaaatgcttgtgtaactattgtgtcatgcaacataaataaacttattgtttcaacacctactaattgtgttgtggttattcattgtatataaactatatttgctacatcctgtttttgttttatatatactatattttgtagcgccagcggccattttgtagcttcaaccgaattcggttgcatgctttttggcacaaaatgtgtttttttaaatagttctatgtcagcaactatagtttaaacttgtacgtttcctgcttgccatgcgtgccaaatccctgttttcctgacctgcactgcttgccaaccattccattgttttttacactgcactatgtgcaactactgaatcactatgtacattgtgtcatataaaataaatcactatgcgccaacgccttacataccgctgttaggcacatatttttggcttgttttaactaacctaattgcatatttggcataaggtttaaacttctaaggccaactaaatgtcaccctagttcatacatgaactgtgtaaaggttagtcatacattgttcatttgtaaaactgcacatgggtgtgtgcaaaccgttttgggttacacatttacaagcaacttatataataatactaaactacaataattcatgtataaaactaagggcgtaaccgaaatcggttgaaccgaaaccggttagtataaaagcagacattttatgcaccaaaagagaactgcaatgtttcaggacccacaggagcgacccagaaagttaccacagttatgcacagagctgcaaacaactatacatgatataatattagaatgtgtgtactgcaagcaacagttactgcgacgtgaggtatatgactttgcttttcgggatttatgcatagtatatagagatgggaatccatatgctgtatgtgataaatgtttaaagttttattctaaaattagtgagtatagacattattgttatagtgtgtatggaacaacattagaacagcaatacaacaaaccgttgtgtgatttgttaattaggtgtattaactgtcaaaagccactgtgtcctgaagaaaagcaaagacatctggacaaaaagcaaagattccataatataaggggtcggtggaccggtcgatgtatgtcttgttgcagatcatcaagaacacgtagagaaacccagctgtaatcatgcatggagatacacctacattgcatgaatatatgttagatttgcaaccagagacaactgatctctactgttatgagcaattaaatgacagctcagaggaggaggatgaaatagatggtccagctggacaagcagaaccggacagagcccattacaatattgtaaccttttgttgcaagtgtgactctacgcttcggttgtgcgtacaaagcacacacgtagacattcgtactttggaagacctgttaatgggcacactaggaattgtgtgccccatctgttctcagaaaccataatctacc

SEQ ID NO: 87 - DNA, 7906 bp, Homo sapiens
  source 1..7906: mol_type = genomic DNA; note = UNCseq2708
atggctgatcctgcaggtaccaatggggaagagggtacgggatgtaatggatggttttatgtagaggctgtagtggaaaaaaaaacaggggatgctatatcagatgacgagaacgaaaatgacagtgatacaggtgaagatttggtagattttatagtaaatgataatgattatttaacacaggcagaaacagagacagcacatgcgttgtttactgcacaggaagcaaaacaacatagagatgcagtacaggttctaaaacgaaagtatttgggtagtccacttagtgatattagtggatgtgtagacaataatattagtcctagattaaaagctatatgtatagaaaaacaaagtagagctgcaaaaaggagattatttgaaagcgaagacagcgggtatggcaatactgaagtggaaactcagcagatgttacaggtagaagggcgccatgagactgaaacaccatgtagtcagtatagtggtggaagtgggggtggttgcagtcagtacagtagtggaagtgggggagagggtgttagtgaaagacacactatatgccaaacaccacttacaaatattttaaatgtactaaaaactagtaatgcaaaggcagcaatgttagcaaaatttaaagagttatacggggtgagtttttcagaattagtaagaccatttaaaagtaataaatcaacgtgttgcgattggtgtattgctgcatttggacttacacccagtatagctgacagtataaaaacactattacaacaatattgtttatatttacacattcaaagtttagcatgttcatggggaatggttgtgttactattagtaagatataaatgtggaaaaaatagagaaacaattgaaaaattgctgtctaaactattatgtgtgtctccaatgtgtatgatgatagagcctccaaaattgcgtagtacagcagcagcattatattggtataaaacaggtatatcaaatattagtgaagtgtatggagacacgccagaatggatacaaagacaaacagtattacaacatagttttaatgattgtacatttgaattatcacagatggtacaatgggcctacgataatgacatagtagacgatagtgaaattgcatataaatatgcacaattggcagacactaatagtaatgcaagtgcctttctaaaaagtaattcacaggcaaaaattgtaaaggattgtgcaacaatgtgtagacattataaacgagcagaaaaaaaacaaatgagtatgagtcaatggataaaatatagatgtgatagggtagatgatggaggtgattggaagcaaattgttatgtttttaaggtatcaaggtgtagagtttatgtcatttttaactgcattaaaaagatttttgcaaggcatacctaaaaaaaattgcatattactatatggtgcagctaacacaggtaaatcattatttggtatgagtttaatgaaatttctgcaagggtctgtaatatgttttgtaaattctaaaagccatttttggttacaaccattagcagatgccaaaataggtatgttagatgatgctacagtgccctgttggaactacatagatgacaatttaagaaatgcattggatggaaatttagtttctatggatgtaaagcatagaccattggtacaactaaaatgccctccattattaattacatctaacattaatgctggtacagattctaggtggccttatttacataatagattggtggtgtttacatttcctaatgagtttccatttgacgaaaacggaaatccagtgtatgagcttaatgataagaactggaaatcctttttctcaaggacgtggtccagattaagtttgcacgaggacgaggacaaggaaaacgatggagactctttgccaacgtttaaatgtgtgtcaggacaaaatactaacacattatgaaaatgatagtacagacctacgtgaccatatagactattggaaacacatgcgcctagaatgtgctatttattacaaggccagagaaatgggatttaaacatattaaccaccaggtggtgccaacactggctgtatcaaagaataaagcattacaagcaattgaactgcaactaacgttagaaacaatatataactcacaatatagtaatgaaaagtggacattacaagacgttagccttgaagtgtatttaactgcaccaacaggatgtataaaaaaacatggatatacagtggaagtgcagtttgatggagacatatgcaatacaatgcattatacaaactggacacatatatatatttgtgaagaagcatcagtaactgtggtagagggtcaagttgactattatggtttatattatgttcatgaaggaatacgaacatattttgtgcagtttaaagatgatgcagaaaaatatagtaaaaataaagtatgggaagttcatgcgggtggtcaggtaatattatgtcctacatctgtgtttagcagcaacgaagtatcctctcctgaaattattaggcagcacttggccaaccactccgccgcgacccataccaaagccgtcgccttgggcaccgaagaaacacagacgactatccagcgaccaagatcagagccagacaccggaaacccctgccacaccactaagttgttgcacagagactcagtggacagtgctccaatcctcactgcatttaacagctcacacaaaggacggattaactgtaatagtaacactacacccatagtacatttaaaaggtgatgctaatactttaaaatgtttaagatatagatttaaaaagcattgtacattgtatactgcagtgtcgtctacatggcattggacaggacataatgtaaaacataaaagtgcaattgttacacttacatatgatagtgaatggcaacgtgaccaatttttgtctcaagttaaaataccaaaaactattacagtgtctactggatttatgtctatatgacaaatcttgatactgcatccacaacattactggcgtgctttttgctttgcttttgtgtgcttttgtgtgtctgcctattaatacgtccgctgcttttgtctgtgtctacatacacatcattaatactattggtattactattgtggataacagcagcctctgcgtttaggtgttttattgtatatattgtatttgtttatataccattatttttaatacatacacatgcacgctttttaattacataatgtatatgtacaaaatgtaattgttacatataattgttgtataccataacttactattttttcttttttattttcatatatattttttttttttgtttgtttgtttgttttttaataaactgttatcacttaacaatgcgacacaaacgttctgcaaaacgcacaaaacgtgcatcggctacccaactttataaaacatgcaaacaggcaggtacatgtccacctgacattatacctaaggttgaaggcaaaactattgctgatcaaatattacaatatggaagtatgggtgtattttttggtgggttaggaattggaacagggtcgggtacaggcggacgcactgggtatattccattgggaacaaggcctcccacagctacagatacacttgctcctgtaagaccccctttaacagtagatcctgtgggcccttctgatccttctatagtttctttagtggaagaaactagttttattgatgctggtgcaccaacatctgtaccttccattcccccagatgtatcaggatttagtattactacttcaactgataccacacctgctatattagatattaataatactgttactactgttactacacataataatcccactttcactgacccatctgtattgcagcctccaacacctgcagaaactggagggcattttacactttcatcatccactattagtacacataattataaagaaattcctatggatacatttattgttagcacaaaccctaacacagtaactagtagcacacccataccagggtctcgcccagtggcacgcctaggattatatagtcgcacaacacaacaagttaaagttgtagaccctgcttttataaccactcccactaaacttattacatatgataatcctgcatatgaaggtatagatgtggataatacattatatttttctagtaatgataatagtattaatatagctccagatcctgactttttggatatagttgctttacataggccagcattaacctctaggcgtactggcattaggtacagtagaattggtaataaacaaacactacgtactcgtagtggaaaatctataggtgctaaggtacattattattatgattttagtactattgatcctgcagaagaaatagaattacaaactataacaccttctacatatactaccacttcacatgcagcctcacctacttctattaataatggattatatgatatttatgcagatgactttattacagatacttctacaaccccggtaccatctgtaccctctacatctttatcaggttatattcctgcaaatacaacaattccttttggtggtgcatacaatattcctttagtatcaggtcctgatatacccattaatataactgaccaagctccttcattaattcctatagttccagggtctccacaatatacaattattgctgatgcaggtgacttttatttacatcctagttattacatgttacgaaaacgacgtaaacgtttaccatattttttttcagatgtctctttggctgcctagtgaggccactgtctacttgcctcctgtcccagtatctaaggttgtaagcacggatgaatatgttgcacgcacaaacatatattatcatgcaggaacatccagactacttgcagttggacatccctattttcctattaaaaaacctaacaataacaaaatattagttcctaaagtatcaggattacaatacagggtatttagaatacatttacctgaccccaataagtttggttttcctgacacctcattttataatccagatacacagcggctggtttgggcctgtgtaggtgttgaggtaggccgtggtcagccattaggtgtgggcattagtggccatcctttattaaataaattggatgacacagaaaatgctagtgcttatgcagcaaatgcaggtgtggataatagagaatgtatatctatggattacaaacaaacacaattgtgtttaattggttgcaaaccacctataggggaacactggggcaaaggatccccatgtaccaatgttgcagtaaatccaggtgattgtccaccattagagttaataaacacagttattcaggatggtgatatggttgatactggctttggtgctatggactttactacattacaggctaacaaaagtgaagttccactggatatttgtacatctatttgcaaatatccagattatattaaaatggtgtcagaaccatatggcgacagcttatttttttatttacgaagggaacaaatgtttgttagacatttatttaatagggctggtgctgttggtgaaaatgtaccagacgatttatacattaaaggctctgggtctactgcaaatttagccagttcaaattattttcctacacctagtggttctatggttacctctgatgcccaaatatttaataaaccttattggttacaacgagcacagggccacaataatggcatttgttggggtaaccaactatttgttactgttgttgatactacacgcagtacaaatatgtcattatgtgctgccatatctacttcagaaactacatataaaaatactaactttaaggagtacctacgacatggggaggaatatgatttacagtttatttttcaactgtgcaaaataaccttaactgcagacgttatgacatacatacattctatgaattccactattttggaggactggaattttggtctacaacctcccccaggaggcacactagaagatacttataggtttgtaacatcccaggcaattgcttgtcaaaaacatacacctccagcacctaaagaagatccccttaaaaaatacactttttgggaagtaaatttaaaggaaaagttttctgcagacctagatcagtttcctttaggacgcaaatttttactacaagcaggattgaaggccaaaccaaaatttacattaggaaaacgaaaagctacacccaccacctcatctacctctacaactgctaaacgcaaaaaacgtaagctgtaagtattgtatgtatgttgaattagtgttgtttgttgtttatatgtttgtatgtgcttgtatgtgcttgtaaatattaagttgtatgtgtgtttgtatgtatggtataataaacacgtgtgtatgtgtttttaaatgcttgtgtaactattgtgtcatgcaacataaataaacttattgtttcaacacctactaattgtgttgtggttattcattgtatataaactatatttgctacatcctgtttttgttttatatatactatattttgtagcgccagcggccattttgtagcttcaaccgaattcggttgcatgctttttggcacaaaatgtgtttttttaaatagttctatgtcagcaactatagtttaaacttgtacgtttcctgcttgccatgcgtgccaaatccctgttttcctgacctgcactgcttgccaaccattccattgttttttacactgcactatgtgcaactactgaatcactatgtacattgtgtcatataaaataaatcactatgcgccaacgccttacataccgctgttaggcacatatttttggcttgttttaactaacctaattgcatatttggcataaggtttaaacttctaaggccaactaaatgtcaccctagttcatacatgaactgtgtaaaggttagtcatacattgttcatttgtaaaactgcacatgggtgtgtgcaaaccgttttgggttacacatttacaagcaacttatataataatactaaactacaataattcatgtataaaactaagggcgtaaccgaaatcggttgaaccgaaaccggttagtataaaagcagacattttatgcaccaaaagagaactgcaatgtttcaggacccacaggagcgacccagaaagttaccacagttatgcacagagctgcaaacaactatacatgatataatattagaatgtgtgtactgcaagcaacagttactgcgacgtgaggtatatgactttgcttttcgggatttatgcatagtatatagagatgggaatccatatgctgtatgtgataaatgtttaaagttttattctaaaattagtgagtatagacattattgttatagtgtgtatggaacaacattagaacagcaatacaacaaaccgttgtgtgatttgttaattaggtgtattaactgtcaaaagccactgtgtcctgaagaaaagcaaagacatctggacaaaaagcaaagattccataatataaggggtcggtggaccggtcgatgtatgtcttgttgcagatcatcaagaacacgtagagaaacccagctgtaatcatgcatggagatacacctacattgcatgaatatatgttagatttgcaaccagagacaactgatctctactgttatgagcaattaaatgacagctcagaggaggaggatgaaatagatggtccagctggacaagcagaaccggacagagcccattacaatattgtaaccttttgttgcaagtgtgactctacgcttcggttgtgcgtacaaagcacacacgtagacattcgtactttggaagacctgttaatgggcacactaggaattgtgtgccccatctgttctcagaaaccataatctacc

SEQ ID NO: 88 - DNA, 7906 bp, Homo sapiens
  source 1..7906: mol_type = genomic DNA; note = UNCseq2750
atggctgatcctgcaggtaccaatggggaagagggtacgggatgtaatggatggttttatgtagaggctgtagtggaaaaaaaaacaggggatgctatatcagatgacgagaacgaaaatgacagtgatacaggtgaagatttggtagattttatagtaaatgataatgattatttaacacaggcagaaacagagacagcacatgcgttgtttactgcacaggaagcaaaacaacatagagatgcagtacaggttctaaaacgaaagtatttgggtagtccacttagtgatattagtggatgtgtagacaataatattagtcctagattaaaagctatatgtatagaaaaacaaagtagagctgcaaaaaggagattatttgaaagcgaagacagcgggtatggcaatactgaagtggaaactcagcagatgttacaggtagaagggcgccatgagactgaaacaccatgtagtcagtatagtggtggaagtgggggtggttgcagtcagtacagtagtggaagtgggggagagggtgttagtgaaagacacactatatgccaaacaccacttacaaatattttaaatgtactaaaaactagtaatgcaaaggcagcaatgttagcaaaatttaaagagttatacggggtgagtttttcagaattagtaagaccatttaaaagtaataaatcaacgtgttgcgattggtgtattgctgcatttggacttacacccagtatagctgacagtataaaaacactattacaacaatattgtttatatttacacattcaaagtttagcatgttcatggggaatggttgtgttactattagtaagatataaatgtggaaaaaatagagaaacaattgaaaaattgctgtctaaactattatgtgtgtctccaatgtgtatgatgatagagcctccaaaattgcgtagtacagcagcagcattatattggtataaaacaggtatatcaaatattagtgaagtgtatggagacacgccagaatggatacaaagacaaacagtattacaacatagttttaatgattgtacatttgaattatcacagatggtacaatgggcctacgataatgacatagtagacgatagtgaaattgcatataaatatgcacaattggcagacactaatagtaatgcaagtgcctttctaaaaagtaattcacaggcaaaaattgtaaaggattgtgcaacaatgtgtagacattataaacgagcagaaaaaaaacaaatgagtatgagtcaatggataaaatatagatgtgatagggtagatgatggaggtgattggaagcaaattgttatgtttttaaggtatcaaggtgtagagtttatgtcatttttaactgcattaaaaagatttttgcaaggcatacctaaaaaaaattgcatattactatatggtgcagctaacacaggtaaatcattatttggtatgagtttaatgaaatttctgcaagggtctgtaatatgttttgtaaattctaaaagccatttttggttacaaccattagcagatgccaaaataggtatgttagatgatgctacagtgccctgttggaactacatagatgacaatttaagaaatgcattggatggaaatttagtttctatggatgtaaagcatagaccattggtacaactaaaatgccctccattattaattacatctaacattaatgctggtacagattctaggtggccttatttacataatagattggtggtgtttacatttcctaatgagtttccatttgacgaaaacggaaatccagtgtatgagcttaatgataagaactggaaatcctttttctcaaggacgtggtccagattaagtttgcacgaggacgaggacaaggaaaacgatggagactctttgccaacgtttaaatgtgtgtcaggacaaaatactaacacattatgaaaatgatagtacagacctacgtgaccatatagactattggaaacacatgcgcctagaatgtgctatttattacaaggccagagaaatgggatttaaacatattaaccaccaggtggtgccaacactggctgtatcaaagaataaagcattacaagcaattgaactgcaactaacgttagaaacaatatataactcacaatatagtaatgaaaagtggacattacaagacgttagccttgaagtgtatttaactgcaccaacaggatgtataaaaaaacatggatatacagtggaagtgcagtttgatggagacatatgcaatacaatgcattatacaaactggacacatatatatatttgtgaagaagcatcagtaactgtggtagagggtcaagttgactattatggtttatattatgttcatgaaggaatacgaacatattttgtgcagtttaaagatgatgcagaaaaatatagtaaaaataaagtatgggaagttcatgcgggtggtcaggtaatattatgtcctacatctgtgtttagcagcaacgaagtatcctctcctgaaattattaggcagcacttggccaaccactccgccgcgacccataccaaagccgtcgccttgggcaccgaagaaacacagacgactatccagcgaccaagatcagagccagacaccggaaacccctgccacaccactaagttgttgcacagagactcagtggacagtgctccaatcctcactgcatttaacagctcacacaaaggacggattaactgtaatagtaacactacacccatagtacatttaaaaggtgatgctaatactttaaaatgtttaagatatagatttaaaaagcattgtacattgtatactgcagtgtcgtctacatggcattggacaggacataatgtaaaacataaaagtgcaattgttacacttacatatgatagtgaatggcaacgtgaccaatttttgtctcaagttaaaataccaaaaactattacagtgtctactggatttatgtctatatgacaaatcttgatactgcatccacaacattactggcgtgctttttgctttgcttttgtgtgcttttgtgtgtctgcctattaatacgtccgctgcttttgtctgtgtctacatacacatcattaatactattggtattactattgtggataacagcagcctctgcgtttaggtgttttattgtatatattatatttgtttatataccattatttttaatacatacacatgcacgctttttaattacataatgtatatgtacaaaatgtaattgttacatataattgttgtataccataacttgctattttttcttttttattttcatatataatttttttttttgtttgtttgtttgttttttaataaactgttatcacttaacaatgcgacacaaacgttctgcaaaacgcacaaaacgtgcatcggctacccaactttataaaacatgcaaacaggcaggtacatgtccacctgacattatacctaaggttgaaggcaaaactattgctgatcaaatattacaatatggaagtatgggtgtattttttggtgggttaggaattggaacagggtcgggtacaggcggacgcactgggtatattccattgggaacaaggcctcccacagctacagatacacttgctcctgtaagaccccctttaacagtagatcctgtgggcccttctgatccttctatagtttctttagtggaagaaactagttttattgatgctggtgcaccaacatctgtaccttccattcccccagatgtatcaggatttagtattactacttcaactgataccacacctgctatattagatattaataatactgttactactgttactacacataataatcccactttcactgacccatctgtattgcagcctccaacacctgcagaaactggagggcattttacactttcatcatccactattagtacacataattatgaagaaattcctatggatacatttattgttagcacaaaccctaacacagtaactagtagcacacccataccagggtctcgcccagtggcacgcctaggattatatagtcgcacaacacaacaggttaaagttgtagaccctgcttttgtaaccactcccactaaacttattacatatgataatcctgcatatgaaggtatagatgtggataatacattatatttttctagtaatgataatagtattaatatagctccagatcctgactttttggatatagttgctttacataggccagcattaacctctaggcgtactggcattaggtacagtagaattggtaataaacaaacactacgtactcgtagtggaaaatctataggtgctaaggtacattattattatgattttagtactattgatcctgcagaagaaatagaattacaaactataacaccttctacatatactaccacttcacatgcagcctcacctacttctattaataatggattatatgatatttatgcagatgactttattacagatacttctacaaccccggtaccatctgtaccctctacatctttatcaggttatattcctgcaaatacaacaattccttttggtggtgcatacaatattcctttagtatcaggtcctgatatacccattaatataactgaccaagctccttcattaattcctatagttccagggtctccacaatatacaattattgctgatgcaggtgacttttatttacatcctagttattacatgttacgaaaacgacgtaaacgtttaccatattttttttcagatgtctctttggctgcctagtgaggccactgtctacttgcctcctgtcccagtatctaaggttgtaagcacggatgaatatgttgcacgcacaaacatatattatcatgcaggaacatccagactacttgcagttggacatccctattttcctattaaaaaacctaacaataacaaaatattagttcctaaagtatcaggattacaatacagggtatttagaatacatttacctgaccccaataagtttggttttcctgacacctcattttataatccagatacacagcggctggtttgggcctgtgtaggtgttgaggtaggtcgtggtcagccattaggtgtgggcattagtggccatcctttattaaataaattggatgacacagaaaatgctagtgcttatgcagcaaatgcaggtgtggataatagagaatgtatatctatggattacaaacaaacacaattgtgtttaattggttgcaaaccacctataggggaacactggggcaaaggatccccatgtaccaatgttgcagtaaatccaggtgattgtccaccattagagttaataaacacagttattcaggatggtgatatggttgatactggctttggtgctatggactttactacattacaggctaacaaaagtgaagttccactggatatttgtacatctatttgcaaatatccagattatattaaaatggtgtcagaaccatatggcgacagcttatttttttatttacggagggaacaaatgtttgttagacatttatttaatagggctggtactgttggtgaaaatgtaccagacgatttatacattaaaggctctgggtctactgcaaatttagccagttcaaattattttcctacacctagtggttctatggttacctctgatgcccaaatattcaataaaccttattggttacaacgagcacagggccacaataatggcatttgttggggtaaccaactatttgttactgttgttgatactacacgcagtacaaatatgtcattatgtgctgccatatctacttcagaaactacatataaaaatactaactttaaggagtacctacgacatggggaggaatatgatttacagtttatttttcaactgtgcaaaataaccttaactgcagacgttatgacatacatacattctatgaattccactattttggaggactggaattttggtctacaacctcccccaggaggcacactagaagatacttataggtttgtaacatcccaggcaattgcttgtcaaaaacatacacctccagcacctaaagaagatccccttaaaaaatacactttttgggaagtaaatttaaaggaaaagttttctgcagacctagatcagtttcctttaggacgcaaatttttactacaagcaggattgaaggccaaaccaaaatttacattaggaaaacgaaaagctacacccaccacctcatctacctctacaactgctaaacgcaaaaaacgtaagctgtaagtattgtatgtatgttgaattagtgttgtttgttgtgtatatgtttgtatgtgcttgtatgtgcttgtaaatattaagttgtatgtgtgtttgtatgtatggtataataaacacgtgtgtatgtgtttttaaatgcttgtgtaactattgtgtcatgcaacataaataaacttattgtttcaacacctactaattgtgttgtggttattcattgtatataaactatatttgctacatcctgtttttgttttatatatactatattttgtagcgccagcggccattttgtagcttcaaccgaattcggttgcatgctttttggcacaaaatgtgtttttttaaatagttctatgtcagcaactatagtttaaacttgtacgtttcctgcttgccatgcgtgccaaatccctgttttcctgacctgcactgcttgccaaccattccattgttttttacactgcactatgtgcaactactgaatcactatgtacattgtgtcatataaaataaatcactatgcgccaacgccttacataccgctgttaggcacatatttttggcttgttttaactaacctaattgcatatttggcataaggtttaaacttctaaggccaactaaatgtcaccctagttcatacatgaactgtgtaaaggttagtcatacattgttcatttgtaaaactgcacatgggtgtgtgcaaaccgttttgggttacacatttacaagcaacttatataataatactaaactacaataattcatgtataaaactaagggcgtaaccgaaatcggttgaaccgaaaccggttagtataaaagcagacattttatgcaccaaaagagaactgcaatgtttcaggacccacaggagcgacccagaaagttaccacagttatgcacagagctgcaaacaactatacatgatataatattagaatgtgtgtactgcaagcaacagttactgcgacgtgaggtatatgactttgcttttcgggatttatgcatagtatatagagatgggaatccatatgctgtatgtgataaatgtttaaagttttattctaaaattagtgagtatagacattattgttatagtttgtatggaacaacattagaacagcaatacaacaaaccgttgtgtgatttgttaattaggtgtattaactgtcaaaagccactgtgtcctgaagaaaagcaaagacatctggacaaaaagcaaagattccataatataaggggtcggtggaccggtcgatgtatgtcttgttgcagatcatcaagaacacgtagagaaacccagctgtaatcatgcatggagatacacctacattgcatgaatatatgttagatttgcaaccagagacaactgatctctactgttatgagcaattaaatgacagctcagaggaggaggatgaaatagatggtccagctggacaagcagaaccggacagagcccattacaatattgtaaccttttgttgcaagtgtgactctacgcttcggttgtgcgtacaaagcacacacgtagacattcgtactttggaagacctgttaatgggcacactaggaattgtgtgccccatctgttctcagaaaccataatctacc

SEQ ID NO: 89 - DNA, 7906 bp, Homo sapiens
  source 1..7906: mol_type = genomic DNA; note = UNCseq2767
atggctgatcctgcaggtaccaatggggaagagggtacgggatgtaatggatggttttatgtagaggctgtagtggaaaaaaaaacaggggatgctatatcagatgacgagaacgaaaatgacagtgatacaggtgaagatttggtagattttatagtaaatgataatgattatttaacacaggcagaaacagagacagcacatgcgttgtttactgcacaggaagcaaaacaacatagagatgcagtacaggttctaaaacgaaagtatttgggtagtccacttagtgatattagtggatgtgtagacaataatattagtcctagattaaaagctatatgtatagaaaaacaaagtagagctgcaaaaaggagattatttgaaagcgaagacagcgggtatggcaatactgaagtggaaactcagcagatgttacaggtagaagggcgccatgagactgaaacaccatgtagtcagtatagtggtggaagtgggggtggttgcagtcagtacagtagtggaagtgggggagagggtgttagtgaaagacacactatatgccaaacaccacttacaaatattttaaatgtactaaaaactagtaatgcaaaggcagcaatgttagcaaaatttaaagagttatacggggtgagtttttcagaattagtaagaccatttaaaagtaataaatcaacgtgttgcgattggtgtattgctgcattcggacttacacccagtatagctgacagtataaaaacactattacaacaatattgtttatatttacacattcaaagtttagcatgttcatggggaatggttgtgttactattagtaagatataaatgtggaaaaaatagagaaacaattgaaaaattgctgtctaaactattatgtgtgtctccaatgtgtatgatgatagagcctccaaaattgcgtagtacagcagcagcattatattggtataaaacaggtatatcaaatattagtgaagtgtatggagacacgccagaatggatacaaagacaaacagtattacaacatagttttaatgattgtacatttgaattatcacagatggtacaatgggcctacgataatgacatagtagacgatagtgaaattgcatataaatatgcacaattggcagacactaatagtaatgcaagtgcctttctaaaaagtaattcacaggcaaaaattgtaaaggattgtgcaacaatgtgtagacattataaacgagcagaaaaaaaacaaatgagtatgagtcaatggataaaatatagatgtgatagggtagatgatggaggtgattggaagcaaattgttatgtttttaaggtatcaaggtgtagagtttatgtcatttttaactgcattaaaaagatttttgcaaggcatacctaaaaaaaattgcatattactatatggtgcagctaacacaggtaaatcattatttggtatgagtttaatgaaatttctgcaagggtctgtaatatgttttgtaaattctaaaagccatttttggttacaaccattagcagatgccaaaataggtatgttagatgatgctacagtgccctgttggaactacatagatgacaatttaagaaatgcattggatggaaatttagtttctatggatgtaaagcatagaccattggtacaactaaaatgccctccattattaattacatctaacattaatgctggtacagattctaggtggccttatttacataatagattggtggtgtttacatttcctaatgagtttccatttgacgaaaacggaaatccagtgtatgagcttaatgataagaactggaaatcctttttctcaaggacgtggtccagattaagtttgcacgaggacgaggacaaggaaaacgatggagactctttgccaacgtttaaatgtgtgtcaggacaaaatactaacacattatgaaaatgatagtacagacctacgtgaccatatagactattggaaacacatgcgcctagaatgtgctatttattacaaggccagagaaatgggatttaaacatattaaccaccaggtggtgccaacactggctgtatcaaagaataaagcattacaagcaattgaactgcaactaacgttagaaacaatatataactcacaatatagtaatgaaaagtggacattacaagacgttagccttgaagtgtatttaactgcaccaacaggatgtataaaaaaacatggatatacagtggaagtgcagtttgatggagacatatgcaatacaatgcattatacaaactggacacatatatatatttgtgaagaagcatcagtaactgtggtagagggacaagttgactattatggtttatattatgttcatgaaggaatacgaacatattttgtgcagtttaaagatgatgcagaaaaatatagtaaaaataaagtatgggaagttcatgcgggtggtcaggtaatattatgtcctacatctgtgtttagcagcaacgaagtatcctctcctgaaattattaggcagcacttggccaaccaccccgccgcgacccataccaaagccgtcgccttgggcaccgaagaaacacagacgactatccagcgaccaagatcagagccagacaccggaaacccctgccacaccactaagttgttgcacagagactcagtggacagtgctccaatcctcactgcatttaacagcgcacacaaaggacggattaactgtaatagtaacactacacccatagtacatttaaaaggtgatgctaatactttaaaatgtttaagatatagatttaaaaagcattgtacattgtatactgcagtgtcgtctacatggcattggacaggacataatgtaaaacataaaagtgcaattgttacacttacatatgatagtgaatggcaacgtgaccaatttttgtctcaagttaaaataccaaaaactattacagtgtctactggatttatgtctatatgacaaatcttgatactgcatccacaacattactggcgtgctttttgctttgcttttgtgtgcttttgtgtgtctgcctattaatacgtccgctgcttttgtctgtgtctacatacacatcattaataatattggtattactattgtggataacagcagcctctgcgtttaggtgttttattgtatatattatatttgtttatataccattatttttaatacatacacatgcacgctttttaattacataatgtatatgtacataatgtaattgttacatataattgttgtataccataacttactattttttcttttttattttcatatataatttttttttgtgtttgtttgtttgttttttaataaactgttattacttaacaatgcgacacaaacgttctgcaaaacgcacaaaacgtgcatcggctacccaactttataaaacatgcaaacaggcaggtacatgtccacctgacattatacctaaggttgaaggcaaaactattgctgatcaaatattacaatatggaagtatgggtgtattttttggtgggttaggaattggcacagggtcgggtacaggcggacgcactgggtatattccattgggaacaaggcctcccacagctacagatacacttgctcctgtaagaccccctttaacagtagatcctgtgggcccttctgatccttctatagtttctttagtggaagaaactagttttattgatgctggtgcaccaacatctgtaccttccattcccccagatgtatcaggatttagtattactacttcaactgataccacacctgctatattagatattaataatactgttactactgttactacacataataatcccactttcactgacccatctgtattgcagcctccaacacctgcagaaactggagggcattttacactttcatcatccactattagtacacataattatgaagaaattcctatggatacatttattgttagcacaaaccctaacacagtaactagtagcacacccataccagggtctcgcccagtggcacgcctaggattatatagtcgcacaacacaacaagttaaagttgtagaccctgcttttgtaaccactcccactaaacttattacatatgataatcctgcatatgaaggtatagatgtggataatacattatatttttctagtaatgataatagtattaatatagctccagatcctgactttttggatatagttgctttacataggccagcattaacctctaggcgtactggcattaggtacagtagaattggtaataaacaaacactacgtactcgtagtggaaaatctataggtgctaaggtacattattattatgatttcagtactattgatcctgcagaagaaatagaattacaaactataacaccttctacatatactaccacttcacatgcagcctcacctacttctattaataatggattatatgatatttatgcagatgactttattacagatacttctacaaccccggtaccatctgtaccctctacatctttatcaggttatattcctgcaaatacaacaattccttttggtggtgcatacaatattcctttagtatcaggtcctgatatacccattaatataactgaccaagctccttcattaattcctatagttccagggtctccacaatatacaattattgctgatgcaggtgacttttatttacatcctagttattacatgttacgaaaacgacgtaaacgtttaccatattttttttcagatgtctctttggctgcctagtgaggccactgtctacttgcctcctgtcccagtatctaaggttgtaagcacggatgaatatgttgcacgcacaaacatatattatcatgcaggaacatccagactacttgcagttggacatccctattttcctattaaaaaacctaacaataacaaaatattagttcctaaagtatcaggattacaatacagggtatttagaatacatttacctgaccccaataagtttggttttcctgacacctcattttataatccagatacacagcggctggtttgggcctgtgtaggtgttgaggtaggtcgtggtcagccattaggtgtgggcattagtggccatcctttattaaataaattggatgacacagaaaatgctagtgcttatgcagcaaatgcaggtgtggataatagagaatgtatatctatggattacaaacaaacacaattgtgtttaattggttgcaaaccacctataggggaacactggggcaaaggatccccatgtaccaatgttgcagtaaatccaggtgattgtccaccattagagttaataaacacagttattcaggatggtgatatggttgatactggctttggtgctatggactttactacattacaggctaacaaaagtgaagttccactggatatttgtacatctatttgcaaatatccagattatattaaaatggtgtcagaaccatatggcgacagcttatttttttatttacgaagggaacaaatgtttgttagacatttatttaatagggctggtactgttggtgaaaatgtaccagacgatttatacattaaaggctctgggtctactgcaaatttagccagttcaaattattttcctacacctagtggttctatggttacctctgatgcccaaatattcaataaaccttattggttacaacgagcacagggccacaataatggcatttgttggggtaaccaactatttgttactgttgttgatactacacgcagtacaaatatgtcattatgtgctgccatatctacttcagaaactacatataaaaatactaactttaaggagtacctacgacatggggaggaatatgatttacagtttatttttcaactgtgcaaaataaccttaactgcagacgttatgacatacatacattctatgaattccactattttggaggactggaattttggtctacaacctcccccaggaggcacactagaagatacttataggtttgtaacatcccaggcaattgcttgtcaaaaacatacacctccagcacctaaagaagatccccttaaaaaatacactttttgggaagtaaatttaaaggaaaagttttctgcagacctagatcagtttcctttaggacgcaaatttttactacaagcaggattgaaggccaaaccaaaatttacattaggaaaacgaaaagctacacccaccacctcatctacctctacaactgctaaacgcaaaaaacgtaagctgtaagtattgtatgtatgttgaattagtgttgtttgttgtgtatatgtttgtatgtgcttgtatgtgcttgtaaatattaagttgtatgtgtgtttgtatgtatggtataataaacacgtgtgtatgtgtttttaaatgcttgtgtaactattgtgtcatgcaacataaataaacttattgtttcaacacctactaattgtgttgtggttattcattgtatataaactatatttgctacatcctgtttttgttttatatatactatattttgtagcgccagcggccattttgtagcttcaaccgaattcggttgcatgctttttggcacaaaatgtgtttttttaaatagttctatgtcagcaactatggtttaaacttgtacgtttcctgcttgccatgcgtgccaaatccctgttttcctgacctgcactgcttgccaaccattccattgttttttacactgcactatgtgcaactactgaatcactatgtacattgtgtcatataaaataaatcactatgcgccaacgccttacataccgctgttaggcacatatttttggcttgttttaactaacctaattgcatatttggcataaggtttaaacttctaaggccaactaaatgtcaccctagttcatacatgaactgtgtaaaggttagtcatacattgttcatttgtaaaactgcacatgggtgtgtgcaaaccgttttgggttacacatttacaagcaacttatataataatactaaactacaataattcatgtataaaactaagggcgtaaccgaaatcggttgaaccgaaaccggttagtataaaagcagacattgtatgcaccaaaagagaactgcaatgtttcaggacccacaggagcgacccagaaagttaccacagttatgcacagagctgcaaacaactatacatgatataatattagaatgtgtgtactgcaagcaacagttactgcgacgtgaggtatatgactttgcttttcgggatttatgcatagtatatagagatgggaatccatatgctgtatgtgataaatgtttaaagttttattctaaaattagtgagtatagacattattgttatagtttgtatggaacaacattagaacagcaatacaacaaaccgttgtgtgatttgttaattaggtgtattaactgtcaaaagccactgtgtcctgaagaaaagcaaagacatctggacaaaaagcaaagattccataatataaggggtcggtggaccggtcgatgtatgtcttgttgcagatcatcaagaacacgtagagaaacccagctgtaatcatgcatggagatacacctacattgcatgaatatatgttagatttgcaaccagagacaactgatctctactgttatgagcaattaaatgacagctcagaggaggaggatgaaatagatggtccagctggacaagcagaaccggacagagcccattacaatattgtaaccttttgttgcaagtgtgactctacgcttcggttgtgcgtacaaagcacacacgtagacattcgtactttggaagacctgttaatgggcacactaggaattgtgtgccccatctgttctcagaaaccataatctacc

SEQ ID NO: 90 - DNA, 7906 bp, Homo sapiens
  source 1..7906: mol_type = genomic DNA; note = UNCseq2768
atggctgatcctgcaggtaccaatggggaagagggtacgggatgtaatggatggttttatgtagaggctgtagtggaaaaaaaaacaggggatgctatatcagatgacgagaacgaaaatgacagtgatacaggtgaagatttggtagattttatagtaaatgataatgattatttaacacaggcagaaacagagacagcacatgcgttgtttactgcacaggaagcaaaacaacatagagatgcagtacaggttctaaaacgaaagtatttgggtagtccacttagtgatattagtggatgtgtagacaataatattagtcctagattaaaagctatatgtatagaaaaacaaagtagagctgcaaaaaggagattatttgaaagcgaagacagcgggtatggcaatactgaagtggaaactcagcagatgttacaggtagaagggcgccatgagactgaaacaccatgtagtcagtatagtggtggaagtgggggtggttgcagtcagtacagtagtggaagtgggggagagggtgttagtgaaagacacactatatgccaaacaccacttacaaatattttaaatgtactaaaaactagtaatgcaaaggcagcaatgttagcaaaatttaaagagttatacggggtgagtttttcagaattagtaagaccatttaaaagtaataaatcaacgtgttgcgattggtgtattgctgcatttggacttacacccagtatagctgacagtataaaaacactattacaacaatattgtttatatttacacattcaaagtttagcatgttcatggggaatggttgtgttactattagtaagatataaatgtggaaaaaatagagaaacaattgaaaaattgctgtctaaactattatgtgtgtctccaatgtgtatgatgatagagcctccaaaattgcgtagtacagcagcagcattatattggtataaaacaggtatatcaaatattagtgaagtgtatggagacacgccagaatggatacaaagacaaacagtattacaacatagttttaatgattgtacatttgaattatcacagatggtacaatgggcctacgataatgacatagtagacgatagtgaaattgcatataaatatgcacaattggcagacactaatagtaatgcaagtgcctttctaaaaagtaattcacaggcaaaaattgtaaaggattgtgcaacaatgtgtagacattataaacgagcagaaaaaaaacaaatgagtatgagtcaatggataaaatatagatgtgatagggtagatgatggaggtgattggaagcaaattgttatgtttttaaggtatcaaggtgtagagtttatgtcatttttaactgcattaaaaagatttttgcaaggcatacctaaaaaaaattgcatattactatatggtgcagctaacacaggtaaatcattatttggtatgagtttaatgaaatttctgcaagggtctgtaatatgttttgtaaattctaaaagccatttttggttacaaccattagcagatgccaaaataggtatgttagatgatgctacagtgccctgttggaactacatagatgacaatttaagaaatgcattggatggaaatttagtttctatggatgtaaagcatagaccattggtacaactaaaatgccctccattattaattacatctaacattaatgctggtacagattctaggtggccttatttacataatagattggtggtgtttacatttcctaatgagtttccatttgacgaaaacggaaatccagtgtatgagcttaatgataagaactggaaatcctttttctcaaggacgtggtccagattaagtttgcacgaggacgaggacaaggaaaacgatggagactctttgccaacgtttaaatgtgtgtcaggacaaaatactaacacattatgaaaatgatagtacagacctacgtgaccatatagactattggaaacacatgcgcctagaatgtgctatttattacaaggccagagaaatgggatttaaacatattaaccaccaggtggtgccaacactggctgtatcaaagaataaagcattacaagcaattgaactgcaactaacgttagaaacaatatataactcacaatatagtaatgaaaagtggacattacaagacgttagccttgaagtgtatttaactgcaccaacaggatgtataaaaaaacatggatatacagtggaagtgcagtttgatggagacatatgcaatacaatgcattatacaaactggacacatatatatatttgtgaagaagcatcagtaactgtggtagagggtcaagttgactattatggtttatattatgttcatgaaggaatacgaacatattttgtgcagtttaaagatgatgcagaaaaatatagtaaaaataaagtatgggaagttcatgcgggtggtcaggtaatattatgtcctacatctgtgtttagcagcaacgaagtatcctctcctgaaattattaggcagcacttggccaaccactccgccgcgacccataccaaagccgtcgccttgggcaccgaagaaacacagacgactatccagcgaccaagatcagagccagacaccggaaacccctgccacaccactaagttgttgcacagagactcagtggacagtgctccaatcctcactgcatttaacagctcacacaaaggacggattaactgtaatagtaacactacacccatagtacatttaaaaggtgatgctaatactttaaaatgtttaagatatagatttaaaaagcattgtacattgtatactgcagtgtcgtctacatggcattggacaggacataatgtaaaacataaaagtgcaattgttacacttacatatgatagtgaatggcaacgtgaccaatttttgtctcaagttaaaataccaaaaactattacagtgtctactggatttatgtctatatgacaaatcttgatactgcatccacaacattactggcgtgctttttgctttgcttttgtgtgcttttgtgtgtctgcctattaatacgtccgctgcttttgtctgtgtctacatacacatcattaatactattggtattactattgtggataacagcagcctctgcgtttaggtgttttattgtatatattgtatttgtttatataccattatttttaatacatacacatgcacgctttttaattacataatgtatatgtacaaaatgtaattgttacatataattgttgtataccataacttactattttttcttttttattttcatatatattttttttttttgtttgtttgtttgttttttaataaactgttattacttaacaatgcgacacaaacgttctgcaaaacgcacaaaacgtgcatcggctacccaactttataaaacatgcaaacaggcaggtacatgtccacctgacattatacctaaggttgaaggcaaaactattgctgatcaaatattacaatatggaagtatgggtgtattttttggtgggttaggaattggaacagggtcgggtacaggcggacgcactgggtatattccattgggaacaaggcctcccacagctacagatacacttgctcctgtaagaccccctttaacagtagatcctgtgggcccttctgatccttctatagtttctttagtggaagaaactagttttattgatgctggtgcaccaacatctgtaccttccattcctccagatgtatcaggatttagtattactacttcaactgataccacacctgctatattagatattaataatactgttactactgttactacacataataatcccactttcactgacccatctgtattgcagcctccaacacctgcagaaactggagggcattttacactttcatcatccactattagtacacataattatgaagacattcctatggatacatttattgttagcacaaaccctaacacagtaactagtagcacacccataccagggtctcgcccagtggcacgcctaggattatatagtcgcacaacacaacaagttaaagttgtagaccctgcttttgtaaccactcccactaaacttattacatatgataatcctgcatatgaaggtatagatgtggataatacattatatttttctagtaatgataatagtattaatatagctccagatcctgactttttggatatagttgctttacataggccagcattaacctctaggcgtactggcattaggtacagtagaattggtaataaacaaacactacgtactcgtagtggaaaatctataggtgctaaggtacattattattatgattttagtactattgatcctgcagaagaaatagaattacaaactataacaccttctacatatactaccacttcacatgcagcctcacctacttctattaataatggattatatgatatttatgcagatgactttattacagatacttctacaaccccggtaccatctgtaccctctacatctttatcaggttatattcctgcaaatacaacaattccttttggtggtgcatacaatattcctttagtatcaggtcctgatatacccattaatataactgaccaagctccttcattaattcctatagttccagggtctccacaatatacaattattgctgatgcaggtgacttttatttacatcctagttattacatgttacgaaaacgacgtaaacgtttaccatattttttttcagatgtctctttggctgcctagtgaggccactgtctacttgcctcctgtcccagtatctaaggttgtaagcacggatgaatatgttgcacgcacaaacatatattatcatgcaggaacatccagactacttgcagttggacatccctattttcctattaaaaaacctaacaataacaaaatattagttcctaaagtatcaggattacaatacagggtatttagaatacatttacctgaccccaataagtttggttttcctgacacctcattttataatccagatacacagcggctggtttgggcctgtgtaggtgttgaggtaggtcgtggtcagccattaggtgtgggcattagtggccatcctttattaaataaattggatgacacagaaaatgctagtgcttatgcagcaaatgcaggtgtggataatagagaatgtatatctatggattacaaacaaacacaattgtgtttaattggttgcaaaccacctataggggaacactggggcaaaggatccccatgtaccaatgttgcagtaaatccaggtgattgtccaccattagagttaataaacacagttattcaggatggtgatatggttgatactggctttggtgctatggactttactacattacaggctaacaaaagtgaagttccactggatatttgtacatctatttgcaaatatccagattatattaaaatggtgtcagaaccatatggcgacagcttatttttttatttacgaagggaacaaatgtttgttagacatttatttaatagggctggtgctgttggtgaaaatgtaccagacgatttatacattaaaggctctgggtctactgcaaatttagccagttcaaattattttcctacacctagtggttctatggttacctctgatgcccaaatattcaataaaccttattggttacaacgagcacagggccacaataatggcatttgttggggtaaccaactatttgttactgttgttgatactacacgcagtacaaatatgtcattatgtgctgccatatctacttcagaaactacatataaaaatactaactttaaggagtacctacgacatggggaggaatatgatttacagtttatttttcaactgtgcaaaataaccttaactgcagacgttatgacatacatacattctatgaattccactattttggaggactggaattttggtctacaacctcccccaggaggcacactagaagatacttataggtttgtaacatcccaggcaattgcttgtcaaaaacatacacctccagcacctaaagaagatccccttaaaaaatacactttttgggaagtaaatttaaaggaaaagttttctgcagacctagatcagtttcctttaggacgcaaatttttactacaagcaggattgaaggccaaaccaaaatttacattaggaaaacgaaaagctacacccaccacctcatctacctctacaactgctaaacgcaaaaaacgtaagctgtaagtattgtatgtatgttgaattagtgttgtttgttgtttatatgtttgtatgtgcttgtatgtgcttgtaaatattaagttgtatgtgtgtttgtatgtatggtataataaacacgtgtgtatgtgtttttaaatgcttgtgtaactattgtgtcatgcaacataaataaacttattgtttcaacacctactaattgtgttgtggttattcattgtatataaactatatttgctacatcctgtttgtgttttatatatactatattttgtagcgccagcggccattttgtagcttcaaccgaattcggttgcatgctttttggcacaaaatgtgtttttttaaatagttctatgtcagcaactatagtttaaacttgtacgtttcctgcttgccatgcgtgccaaatccctgttttcctgacctgcactgcttgccaaccattccattgttttttacactgcactatgtgcaactactgaatcactatgtacattgtgtcatataaaataaatcactatgcgccaacgccttacataccgctgttaggcacatatttttggcttgttttaactaacctaattgcatatttggcataaggtttaaacttctaaggccaactaaatgtcaccctagttcatacatgaactgtgtaaaggttagtcatacattgttcatttgtaaaactgcacatgggtgtgtgcaaaccgttttgggttacacatttacaagcaacttatataataatactaaactacaataattcatgtataaaactaagggcgtaaccgaaatcggttgaaccgaaaccggttagtataaaagcagacattttatgcaccaaaagagaactgcaatgtttcaggacccacaggagcgacccagaaagttaccacagttatgcacagagctgcaaacaactatacatgatataatattagaatgtgtgtactgcaagcaacagttactgcgacgtgaggtatatgactttgcttttcgggatttatgcatagtatatagagatgggaatccatatgctgtatgtgataaatgtttaaagttttattctaaaattagtgagtatagacattattgttatagtgtgtatggaacaacattagaacagcaatacaacaaaccgttgtgtgatttgttaattaggtgtattaactgtcaaaagccactgtgtcctgaagaaaagcaaagacatctggacaaaaagcaaagattccataatataaggggtcggtggaccggtcgatgtatgtcttgttgcagatcatcaagaacacgtagagaaacccagctgtaatcatgcatggagatacacctacattgcatgaatatatgttagatttgcaaccagagacaactgatctctactgttatgagcaattaaatgacagctcagaggaggaggatgaaatagatggtccagctggacaagcagaaccggacagagcccattacaatattgtaaccttttgttgcaagtgtgactctacgcttcggttgtgcgtacaaagcacacacgtagacattcgtactttggaagacctgttaatgggcacactaggaattgtgtgccccatctgttctcagaaaccataatctacc

SEQ ID NO: 91 - DNA, 7906 bp, Homo sapiens
  source 1..7906: mol_type = genomic DNA; note = UNCseq2769
atggctgatcctgcaggtaccaatggggaagagggtacgggatgtaatggatggttttatgtagaggctgtagtggaaaaaaaaacaggggatgctatatcagatgacgagaacgaaaatgacagtgatacaggtgaagatttggtagattttatagtaaatgataatgattatttaacacaggcagaaacagagacagcacatgcgttgtttactgcacaggaagcaaaacaacatagagatgcagtacaggttctaaaacgaaagtatttgggtagtccacttagtgatattagtggatgtgtagacaataatattagtcctagattaaaagctatatgtatagaaaaacaaagtagagctgcaaaaaggagattatttgaaagcgaagacagcgggtatggcaatactgaagtggaaactcagcagatgttacaggtagaagggcgccatgagactgaaacaccatgtagtcagtatagtggtggaagtgggggtggttgcagtcagtacagtagtggaagtgggggagagggtgttagtgaaagacacactatatgccaaacaccacttacaaatattttaaatgtactaaaaactagtaatgcaaaggcagcaatgttagcaaaatttaaagagttatacggggtgagtttttcagaattagtaagaccatttaaaagtaataaatcaacgtgttgcgattggtgtattgctgcatttggacttacacccagtatagctgacagtataaaaacactattacaacaatattgtttatatttacacattcaaagtttagcatgttcatggggaatggttgtgttactattagtaagatataaatgtggaaaaaatagagaaacaattgaaaaattgctgtctaaactattatgtgtgtctccaatgtgtatgatgatagagcctccaaaattgcgtagtacagcagcagcattatattggtataaaacaggtatatcaaatattagtgaagtgtatggagacacgccagaatggatacaaagacaaacagtattacaacatagttttaatgattgtacatttgaattatcacagatggtacaatgggcctacgataatgacatagtagacgatagtgaaattgcatataaatatgcacaattggcagacactaatagtaatgcaagtgcctttctaaaaagtaattcacaggcaaaaattgtaaaggattgtgcaacaatgtgtagacattataaacgagcagaaaaaaaacaaatgagtatgagtcaatggataaaatatagatgtgatagggtagatgatggaggtgattggaagcaaattgttatgtttttaaggtatcaaggtgtagagtttatgtcatttttaactgcattaaaaagatttttgcaaggcatacctaaaaaaaattgcatattactatatggtgcagctaacacaggtaaatcattatttggtatgagtttaatgaaatttctgcaagggtctgtaatatgttttgtaaattctaaaagccatttttggttacaaccattagcagatgccaaaataggtatgttagatgatgctacagtgccctgttggaactacatagatgacaatttaagaaatgcattggatggaaatttagtttctatggatgtaaagcatagaccattggtacaactaaaatgccctccattattaattacatctaacattaatgctggtacagattctaggtggccttatttacataatagattggtggtgtttacatttcctaatgagtttccatttgacgaaaacggaaatccagtgtatgagcttaatgataagaactggaaatcctttttctcaaggacgtggtccagattaagtttgcacgaggacgaggacaaggaaaacgatggagactctttgccaacgtttaaatgtgtgtcaggacaaaatactaacacattatgaaaatgatagtacagacctacgtgaccatatagactattggaaacacatgcgcctagaatgtgctatttattacaaggccagagaaatgggatttaaacatattaaccaccaggtggtgccaacactggctgtatcaaagaataaagcattacaagcaattgaactgcaactaacgttagaaacaatatataactcacaatatagtaatgaaaagtggacattacaagacgttagccttgaagtgtatttaactgcaccaacaggatgtataaaaaaacatggatatacagtggaagtgcagtttgatggagacatatgcaatacaatgcattatacaaactggacacatatatatatttgtgaagaagcatcagtaactgtggtagagggtcaagttgactattatggtttatattatgttcatgaaggaatacgaacatattttgtgcagtttaaagatgatgcagaaaaatatagtaaaaataaagtatgggaagttcatgcgggtggtcaggtaatattatgtcctacatctgtgtttagcagcaacgaagtatcctctcctgaaattattaggcagcacttggccaaccaccccgccgcgacccataccaaagccgtcgccttgggcaccgaagaaacacagacgactatccagcgaccaagatcagagccagacaccggaaacccctgccacaccactaagttgttgcacagagactcagtggacagtgctccaatcctcactgcatttaacagcgcacacaaaggacggattaactgtaatagtaacactacacccatagtacatttaaaaggtgatgctaatactttaaaatgtttaagatatagatttaaaaagcattgtacattgtatactgcagtgtcgtctacatggcattggacaggacataatgtaaaacataaaagtgcaattgttacacttacatatgatagtgaatggcaacgtgaccaatttttgtctgaagttaaaataccaaaaactattacagtgtctactggatttatgtctatatgacaaatcttgatactgcatccacaacattactggcgtgctttttgctttgcttttgtgtgcttttgtgtgtctgcctattaatacgtccgctgcttttgtctgtgtctacatacacatcattaataatattggtattactattgtggataacagcagcctctgcgtttaggtgttttattgtatatattatatttgtttatataccattatttttaatacatacacatgcacgctttttaattacataatgtatatgtacataatgtaattgttacatataattgttgtataccataacttactattttttcttttttattttcatatataatttttttttgtgtttgtttgtttgttttttaataaactgttatcacttaacaatgcgacacaaacgttctgcaaaacgcacaaaacgtgcatcggctacccaactttataaaacatgcaaacaggcaggtacatgtccacctgacattatacctaaggttgaaggcaaaactattgctgatcaaatattacaatatggaagtatgggtgtattttttggtgggttaggaattggcacagggtcgggtacaggcggacgcactgggtatattccattgggaacaaggcctcccacagctacagatacacttgctcctgtaagaccccctttaacagtagatcctgtgggcccttctgatccttctatagtttctttagtggaagaaactagttttattgatgctggtgcaccaacatctgtaccttccattcccccagatgtatcaggatttagtattactacttcaactgataccacacctgctatattagatattaataatactgttactactgttactacacataataatcccactttcactgacccatctgtattgcagcctccaacacctgcagaaactggagggcattttacactttcatcatccactattagtacacataattatgaagaaattcctatggatacatttattgttagcacaaaccctaacacagtaactagtagcacacccataccagggtctcgcccagtggcacgcctaggattatatagtcgcacaacacaacaagttaaagttgtagaccctgcttttgtaaccactcccactaaacttattacatatgataatcctgcatatgaaggtatagatgtggataatacattatatttttctagtaatgataatagtattaatatagctccagatcctgactttttggatatagttgctttacataggccagcattaacctctaggcgtactggcattaggtacagtagaattggtaataaacaaacactacgtactcgtagtggaaaatctataggtgctaaggtacattattattatgatttcagtactattgatcctgcagaagaaatagaattacaaactataacaccttctacatatactaccacttcacatgcagcctcacctacttctattaataatggattatatgatatttatgcagatgactttattacagatacttctacaaccccggtaccatctgtaccctctacatctttatcaggttatattcctgcaaatacaacaattccttttggtggtgcatacaatattcctttagtatcaggtcctgatatacccattaatataactgaccaagctccttcattaattcctatagttccagggtctccacaatatacaattattgctgatgcaggtgacttttatttacatcctagttattacatgttacgaaaacgacgtaaacgtttaccatattttttttcagatgtctctttggctgcctagtgaggccactgtctacttgcctcctgtcccagtatctaaggttgtaagcacggatgaatatgttgcacgcacaaacatatattatcatgcaggaacatccagactacttgcagttggacatccctattttcctattaaaaaacctaacaataacaaaatattagttcctaaagtatcaggattacaatacagggtatttagaatacatttacctgaccccaataagtttggttttcctgacacctcattttataatccagatacacagcggctggtttgggcctgtgtaggtgttgaggtaggtcgtggtcagccattaggtgtgggcattagtggccatcctttattaaataaattggatgacacagaaaatgctagtgcttatgcagcaaatgcaggtgtggataatagagaatgtatatctatggattacaaacaaacacaattgtgtttaattggttgcaaaccacctataggggaacactggggcaaaggatccccatgtaccaatgttgcagtaaatccaggtgattgtccaccattagagttaataaacacagttattcaggatggtgatatggttgatactggctttggtgctatggactttactacattacaggctaacaaaagtgaagttccactggatatttgtacatctatttgcaaatatccagattatattaaaatggtgtcagaaccatatggcgacagcttatttttttatttacgaagggaacaaatgtttgttagacatttatttaatagggctggtactgttggtgaaaatgtaccagacgatttatacattaaaggctctgggtctactgcaaatttagccagttcaaattattttcctacacctagtggttctatggttacctctgatgcccaaatattcaataaaccttattggttacaacgagcacagggccacaataatggcatttgttggggtaaccaactatttgttactgttgttgatactacacgcagtacaaatatgtcattatgtgctgccatatctacttcagaaactacatataaaaatactaactttaaggagtacctacgacatggggaggaatatgatttacagtttatttttcaactgtgcaaaataaccttaactgcagacgttatgacatacatacattctatgaattccactattttggaggactggaattttggtctacaacctcccccaggaggcacactagaagatacttataggtttgtaacatcccaggcaattgcttgtcaaaaacatacacctccagcacctaaagaagatccccttaaaaaatacactttttgggaagtaaatttaaaggaaaagttttctgcagacctagatcagtttcctttaggacgcaaatttttactacaagcaggattgaaggccaaaccaaaatttacattaggaaaacgaaaagctacacccaccacctcatctacctctacaactgctaaacgcaaaaaacgtaagctgtaagtattgtatgtatgttgaattagtgttgtttgttgtgtatatgtttgtatgtgcttgtatgtgcttgtaaatattaagttgtatgtgtgtttgtatgtatggtataataaacacgtgtgtatgtgtttttaaatgcttgtgtaactattgtgtcatgcaacataaataaacttattgtttcaacacctactaattgtgttgtggttattcattgtatatacactatatttgctacatcctgtttttgttttatatatactatattttgtagcgccagcggccattttgtagcttcaaccgaattcggttgcatgctttttggcacaaaatgtgtttttttaaatagttctatgtcagcaactatggtttaaacttgtacgtttcctgcttgccatgcgtgccaaatccctgttttcctgacctgcactgcttgccaaccattccattgttttttacactgcactatgtgcaactactgaatcactatgtacattgtgtcatataaaataaatcactatgcgccaacgccttacataccgctgttaggcacatatttttggcttgttttaactaacctaattgcatatttggcataaggtttaaacttctaaggccaactaaatgtcaccctagttcatacatgaactgtgtaaaggttagtcatacattgttcatttgtaaaactgcacatgggtgtgtgcaaaccgttttgggttacacatttacaagcaacttatataataatactaaactacaataattcatgtataaaactaagggcgtaaccgaaatcggttgaaccgaaaccggttagtataaaagcagacattttatgcaccaaaagagaactgcaatgtttcaggacccacaggagcgacccagaaagttaccacagttatgcacagagctgcaaacaactatacatgatataatattagaatgtgtgtactgcaagcaacagttactgcgacgtgaggtatatgactttgcttttcgggatttatgcatagtatatagagatgggaatccatatgctgtatgtgataaatgtttaaagttttattctaaaattagtgagtatagacattattgttatagtttgtatggaacaacattagaacagcaatacaacaaaccgttgtgtgatttgttaattaggtgtattaactgtcaaaagccactgtgtcctgaagaaaagcaaagacatctggacaaaaagcaaagattccataatataaggggtcggtggaccggtcgatgtatgtcttgttgcagatcatcaagaacacgtagagaaacccagctgtaatcatgcatggagatacacctacattgcatgaatatatgttagatttgcaaccagagacaactgatctctactgttatgagcaattaaatgacagctcagaggaggaggatgaaatagatggtccagctggacaagcagaaccggacagagcccattacaatattgtaaccttttgttgcaagtgtgactctacgcttcggttgtgcgtacaaagcacacacgtagacattcgtactttggaagacctgttaatgggcacactaggaattgtgtgccccatctgttctcagaaaccataatctacc

SEQ ID NO: 92 - DNA, 7906 bp, Homo sapiens
  source 1..7906: mol_type = genomic DNA; note = UNCseq2770
atggctgatcctgcaggtaccaatggggaagagggtacgggatgtaatggatggttttatgtagaggctgtagtggaaaaaaaaacaggggatgctatatcagatgacgagaacgaaaatgacagtgatacaggtgaagatttggtagattttatagtaaatgataatgattatttaacacaggcagaaacagagacagcacatgcgttgtttactgcacaggaagcaaaacaacatagagatgcagtacaggttctaaaacgaaagtatttgggtagtccacttagtgatattagtggatgtgtagacaataatattagtcctagattaaaagctatatgtatagaaaaacaaagtagagctgcaaaaaggagattatttgaaagcgaagacaacgggtatggcaatactgaagtggaaactcagcagatgttacaggtagaagggcgccatgagactgaaacaccatgtagtcagtatagtggtggaagtgggggtggttgcagtcagtacagtagtggaagtgggggagagggtgttagtgaaagacacactatatgccaaacaccacttacaaatattttaaatgtactaaaaactagtaatgcaaaggcagcaatgttagcaaaatttaaagagttatacggggtgagtttttcagaattagtaagaccatttaaaagtaataaatcaacgtgttgcgattggtgtattgctgcattcggacttacacccagtatagctgacagtataaaaacactattacaacaatattgtttatatttacacattcaaagtttagcatgttcatggggaatggttgtgttactattagtaagatataaatgtggaaaaaatagagaaacaattgaaaaattgctgtctaaactattatgtgtgtctccaatgtgtatgatgatagagcctccaaaattgcgtagtacagcagcagcattatattggtataaaacaggtatatcaaatattagtgaagtgtatggagacacgccagaatggatacaaagacaaacagtattacaacatagttttaatgattgtacatttgaattatcacagatggtacaatgggcctacgataatgacatagtagacgatagtgaaattgcatataaatatgcacaattggcagacactaatagtaatgcaagtgcctttctaaaaagtaattcacaggcaaaaattgtaaaggattgtgcaacaatgtgtagacattataaacgagcagaaaaaaaacaaatgagtatgagtcaatggataaaatatagatgtgatagggtagatgatggaggtgattggaagcaaattgttatgtttttaaggtatcaaggtgtagagtttatgtcatttttaactgcattaaaaagatttttgcaaggcatacctaaaaaaaattgcatattactatatggtgcagctaacacaggtaaatcattatttggtatgagtttaatgaaatttctgcaagggtctgtaatatgttttgtaaattctaaaagccatttttggttacaaccattagcagatgccaaaataggtatgttagatgatgctacagtgccctgttggaactacatagatgacaatttaagaaatgcattggatggaaatttagtttctatggatgtaaagcatagaccattggtacaactaaaatgccctccattattaattacatctaacattaatgctggtacagattctaggtggccttatttacataatagattggtggtgtttacatttcctaatgagtttccatttgacgaaaacggaaatccagtgtatgagcttaatgataagaactggaaatcctttttctcaaggacgtggtccagattaagtttgcacgaggacgaggacaaggaaaacgatggagactctttgccaacgtttaaatgtgtgtcaggacaaaatactaacacattatgaaaatgatagtacagacctacgtgaccatatagactattggaaacacatgcgcctagaatgtgctatttattacaaggccagagaaatgggatttaaacatattaaccaccaggtggtgccaacactggctgtatcaaagaataaagcattacaagcaattgaactgcaactaacgttagaaacaatatataactcacaatatagtaatgaaaagtggacattacaagacgttagccttgaagtgtatttaactgcaccaacaggatgtataaaaaaacatggatatacagtggaagtgcagtttgatggagacatatgcaatacaatgcattatacaaactggacacatatatatatttgtgaagaagcatcagtaactgtggtagagggacaagttgactattatggtttatattatgttcatgaaggaatacgaacatattttgtgcagtttaaagatgatgcagaaaaatatagtaaaaataaagtatgggaagttcatgcgggtggtcaggtaatattatgtcctacatctgtgtttagcagcaacgaagtatcctctcctgaaattattaggcagcacttggccaaccaccccgccgcgacccataccaaagccgtcgccttgggcaccgaagaaacacagacgactatccagcgaccaagatcagagccagacaccggaaacccctgccacaccactaagttgttgcacagagactcagtggacagtgctccaatcctcactgcatttaacagcgcacacaaaggacggattaactgtaatagtaacactacacccatagtacatttaaaaggtgatgctaatactttaaaatgtttaagatatagatttaaaaagcattgtacattgtatactgcagtgtcgtctacatggcattggacaggacataatgtaaaacataaaagtgcaattgttacacttacatatgatagtgaatggcaacgtgaccaatttttgtctcaagttaaaataccaaaaactattacagtgtctactggatttatgtctatatgacaaatcttgatactgcatccacaacattactggcgtgctttttgctttgcttttgtgtgcttttgtgtgtctgcctattaatacgtccgctgcttttgtctgtgtctacatacacatcattaataatattggtattactattgtggataacagcagcctctgcgtttaggtgttttattgtatatattatatttgtttatataccattatttttaatacatacacatgcacgctttttaattacataatgtatatgtacataatgtaattgttacatataattgttgtataccataacttactattttttcttttttattttcatatataatttttttttgtgtttgtttgtttgttttttaataaactgttatcacttaacaatgcgacacaaacgttctgcaaaacgcacaaaacgtgcatcggctacccaactgtataaaacatgcaaacaggcaggtacatgtccacctgacattatacctaaggttgaaggcaaaactattgctgatcaaatattacaatatggaagtatgggtgtattttttggtgggttaggaattggcacagggtcgggtacaggcggacgcactgggtatattccattgggaacaaggcctcccacagctacagatacacttgctcctgtaagaccccctttaacagtagatcctgtgggcccttctgatccttctatagtttctttagtggaagaaactagttttattgatgctggtgcaccaacatctgtaccttccattcccccagatgtatcaggatttagtattactacttcaactgataccacacctgctatattagatattaataatactgttactactgttactacacataataatcccactttcactgacccatctgtattgcagcctccaacacctgcagaaactggagggcattttacactttcatcatccactattagtacacataattatgaagaaattcctatggatacatttattgttagcacaaaccctaacacagtaactagtagcacacccataccagggtctcgcccagtggcacgcctaggattatatagtcgcacaacacaacaagttaaagttgtagaccctgcttttgtaaccactcccactaaacttattacatatgataatcctgcatatgaaggtatagatgtggataatacattatatttttctagtaatgataatagtattaatatagctccagatcctgactttttggatatagttgctttacataggccagcattaacctctaggcgtactggcattaggtacagtagaattggtaataaacaaacactacgtactcgtagtggaaaatctataggtgctaaggtacattattattatgatttcagtactattgatcctgcagaagaaatagaattacaaactataacaccttctacatatactaccacttcacatgcagcctcacctacttctattaataatggattatatgatatttatgcagatgactttattacagatacttctacaaccccggtaccatctgtaccctctacatctttatcaggttatattcctgcaaatacaacaattccttttggtggtgcatacaatattcctttagtatcaggtcctgatatacccattaatataactgaccaagctccttcattaattcctatagttccagggtctccacaatatacaattattgctgatgcaggtgacttttatttacatcctagttattacatgttacgaaaacgacgtaaacgtttaccatattttttttcagatgtctctttggctgcctagtgaggccactgtctacttgcctcctgtcccagtatctaaggttgtaagcacggatgaatatgttgcacgcacaaacatatattatcatgcaggaacatccagactacttgcagttggacatccctattttcctattaaaaaacctaacaataacaaaatattagttcctaaagtatcaggattacaatacagggtatttagaatacatttacctgaccccaataagtttggttttcctgacacctcattttataatccagatacacagcggctggtttgggcctgtgtaggtgttgaggtaggtcgtggtcagccattaggtgtgggcattagtggccatcctttattaaataaattggatgacacagaaaatgctagtgcttatgcagcaaatgcaggtgtggataatagagaatgtatatctatggattacaaacaaacacaattgtgtttaattggttgcaaaccacctataggggaacactggggcaaaggatccccatgtaccaatgttgcagtaaatccaggtgattgtccaccattagagttaataaacacagttattcaggatggtgatatggttgatactggctttggtgctatggactttactacattacaggctaacaaaagtgaagttccactggatatttgtacatctatttgcaaatatccagattatattaaaatggtgtcagaaccatatggcgacagcttatttttttatttacgaagggaacaaatgtttgttagacatttatttaatagggctggtactgttggtgaaaatgtaccagacgatttatacattaaaggctctgggtctactgcaaatttagccagttcaaattattttcctacacctagtggttctatggttacctctgatgcccaaatattcaataaaccttattggttacaacgagcacagggccacaataatggcatttgttggggtaaccaactatttgttactgttgttgatactacacgcagtacaaatatgtcattatgtgctgccatatctacttcagaaactacatataaaaatactaactttaaggagtacctacgacatggggaggaatatgatttacagtttatttttcaactgtgcaaaataaccttaactgcagacgttatgacatacatacattctatgaattccactattttggaggactggaattttggtctacaacctcccccaggaggcacactagaagatacttataggtttgtaacatcccaggcaattgcttgtcaaaaacatacacctccagcacctaaagaagatccccttaaaaaatacactttttgggaagtaaatttaaaggaaaagttttctgcagacctagatcagtttcctttaggacgcaaatttttactacaagcaggattgaaggccaaaccaaaatttacattaggaaaacgaaaagctacacccaccacctcatctacctctacaactgctaaacgcaaaaaacgtaagctgtaagtattgtatgtatgttgaattagtgttgtttgttgtgtatatgtttgtatgtgcttgtatgtgcttgtaaatattaagttgtatgtgtgtttgtatgtatggtataataaacacgtgtgtatgtgtttttaaatgcttgtgtaactattgtgtcatgcaacataaataaacttattgtttcaacacctactaattgtgttgtggttattcattgtatataaactatatttgctacatcctgtttttgttttatatatactatattttgtagcgccagcggccattttgtagcttcaaccgaattcggttgcatgctttttggcacaaaatgtgtttttttaaatagttctatgtcagcaactatggtttaaacttgtacgtttcctgcttgccatgcgtgccaaatccctgttttcctgacctgcactgcttgccaaccattccattgttttttacactgcactatgtgcaactactgaatcactatgtacattgtgtcatataaaataaatcactatgcgccaacgccttacataccgctgttaggcacatatttttggcttgttttaactaacctaattgcatatttggcataaggtttaaacttctaaggccaactaaatgtcaccctagttcatacatgaactgtgtaaaggttagtcatacattgttcatttgtaaaactgcacatgggtgtgtgcaaaccgttttgggttacacatttacaagcaacttatataataatactaaactacaataattcatgtataaaactaagggcgtaaccgaaatcggttgaaccgaaaccggttagtataaaagcagacattttatgcaccaaaagagaactgcaatgtttcaggacccacaggagcgacccagaaagttaccacagttatgcacagagctgcaaacaactatacatcatataatattagaatgtgtgtactgcaagcaacagttactgcgacgtgaggtatatgactttgcttttcgggatttatgcatagtatatagagatgggaatccatatgctgtatgtgataaatgtttaaagttttattctaaaattagtgagtatagacattattgttatagtttgtatggaacaacattagaacagcaatacaacaaaccgttgtgtgatttgttaattaggtgtattaactgtcaaaagccactgtgtcctgaagaaaagcaaagacatctggacaaaaagcaaagattccataatataaggggtcggtggaccggtcgatgtatgtcttgttgcagatcatcaagaacacgtagagaaacccagctgtaatcatgcatggagatacacctacattgcatgaatatatgttagatttgcaaccagagacaactgatctctactgttatgagcaattaaatgacagctcagaggaggaggatgaaatagatggtccagctggacaagcagaaccggacagagcccattacaatattgtaaccttttgttgcaagtgtgactctacgcttcggttgtgcgtacaaagcacacacgtagacattcgtactttggaagacctgttaatgggcacactaggaattgtgtgccccatctgttctcagaaaccataatctacc

SEQ ID NO: 93 - DNA, 7906 bp, Homo sapiens
  source 1..7906: mol_type = genomic DNA; note = UNCseq2771
atggctgatcctgcaggtaccaatggggaagagggtacgggatgtaatggatggttttatgtagaggctgtagtggaaaaaaaaacaggggatgctatatcagatgacgagaacgaaaatgacagtgatacaggtgaagatttggtagattttatagtaaatgataatgattatttgacacaggcagaaacagagacagcacatgcgttgtttactgcacaggaagcaaaagaacatagagatgcagtacaggttctaaaacgaaagtatttgggtagtccacttagtgatattagtgaatgtgtagacaataatattagtcctagattaaaagccatatgtatagaaaaacaaagtagagctgcaaaaaggagattatttgaaagcgaagacagcgggtatggcaatactgaagtggaaactcagcagatgttacaggtagaagggcgccatgagactgaaacaccatgtagtcagtatagtggtggaagtgggggtggtagcagtcagtatagtagtggaagtgggggagagggtgttagtgaaagacacactatatgcgaaacaccacttacaaatattttaaatgtactaaaaactagtaatgcaaaggcagcaatgctagcaaaatttaaagagttatacggggtgagttttacagaattagtaagaccatttaaaagtaataaatcaacgtgttgcgattggtgtattgctgcatttggacttacacccagtatagctgacagtataaaaacattattacaacaatattgtttatatttacacattcaaagtttagcgtgttcatggggaatggttgtgttactattagtaagatataaatgtggaaaaaatagagaaacaattgaaaaattgatgtctaaactattatgtgtgtctccaatgtgtatgatgatagagcctccaaaattgcgtagtacagcagcagcattatattggtataaaacaggtatgtcaaatattagtgaagtgtatggagacacgccagaatggatacaaagacaaacagtattacaacatagttttaatgattgtacatttgaattatcacagatggtacaatgggcctacgataatgacatagtagacgatagtgaaattgcatataaatatgcacaattggcagacactaatagtaatgcaagtgcctttttaaaaagtaattcacaggcaaaaattgtaaaggattgtgcaacaatgtgtagacattataaacgagcagaaaaaaaacaaatgagtatgagtcaatggataaaatatagatgtgatagggtagatgatggaggtgattggaagcaaattgttatgtttttaaggtatcaaggtgtagactttatgtcatttttaagtgcattaaaaaaatttctgcaaggtatacctaaaaaaaattgcatattattatatggtgcagctaacacaggtaaatcattatttggtatgagtttaatgaaatttctgcaagggtctgtaatatgttttgtaaattctaaaagccatttttggttacaaccattagcagatgccaaaataggtatgttagatgatgctacagtgccctgttggaactacatagatgacaatttaagaaatgcattggatggaaatttagtttctatggatgtaaagcatagaccattggtacaactaaaatgccctccattattaattacatctaacattaatgctggtacagattccaggtggccttatttacataatcgattggtggtgtttacatttccaaatgagtttccatttgacaaaaacggaaatccagtgtatgagcttaatgataagaactggaaatcctttttctcaaggacgtggtccagattaagtttgcacgaggacgaggacaaggaaaacgatggagactctttgccaacgtttaaatgtgtgtcaggacaaaatactaacacattatgaaaatgatagtacagacctacgtgaccatatagactattggaaacaaatgcgcctagaatgtgctatttattacaaggccagagaaatgggatttaaacatattaaccaccaggtggtgccaacactggctgtatcaaagaataaagcattacaagcaattgaactgcaactaacgttagaaacaatatataactcacaatatagtaatgaaaagtggacattacaagacgttagccttgaagtgtatttaactgcaccaacaggatgtataaaaaaacatggatatacagtggaagtgcagtttgatggagacatatgcaatacaatgcattatacaaactggaaacatatatatatttgtgaagacacatcagtaactgtggtagagggtcaagttgactattatggtatatattatgttcatgaaggaatacaaacatattttgtgcagtttaaagatgatgcagaaaaatatagtaaaaataaagtatgggaagttcatgcgggtggtcaggtaatattatgtcctacatctgtgtttagcagcgacgaagtatcctctgctgaaattactaggcagcacttggccaaccactccgccgcgacccataccaaagccgtcgccttgggcaccaaagaaacacagacgactatccagcgaccaagatcagagccagacaccggaaacccctgccacaccactaagttgttgcacagagactccgtggacagtgctccaatcctcactgcagttaacagctcacacaaaggacggattaactgtaatagtaacactacacccatagtacatttaaaaggtgatgctaatactttaaaatgtttaagatacagatttaaaaagcattgtaaattgtatacagcagtgtcgtccacatggcattggacaggacataatgtaaaacataaaagtgcaattgttacacttacatatgatagtgaatgtcaacgtgaacaatttttgtctcaagtgaaaataccaaaaactattacagtgtctactggatttatgtctatatgacaaaccttgatactgcatccacaacattactggcgtgctttttgctttgcttttgtgtgcttttgtgtgtctgcctattaatacgtccgctgcttttgtctgtgtctacatacacatcattaatactattggtattagtattgtggataacagcagcctctgcatttaggtgttttattgtatatattgtatttgtttatataccattatttttaatacatacacatgcacgcttcttaattacataatgtatatgtacataatgtaattgttacatataattgttgtataccataaattactattttttcttttttattttcatatatagtttttttttttgtttgtttgtttgttttttaataaactgttattacttaacaatgcgacacaaacgttctgcaaaacgcacaaaacgtgcatcggctacccaactttataaaacatgcaaacaggcaggtacatgtccacctgacattatacctaaggttgaaggcaaaactattgctgatcaaatattacaatatggaagtatgggtgtattttttggtgggttaggaattggaacagggtctggtacaggcggacgcactgggtacattccattaggaacaaggcctcccacagctacagatacacttgctcctgtaagaccccctttaacagtagatcctgtgggcccttctgatccttctatagtttctttagtggaagaaactagttttattgatgctggtgcaccaacatctgtaccttccattcccccagatgtatcaggatttagtattacaacttcaactgataccacacctgctatattagatattaataatactgttactactgttactacacataataatcccacttttactgacccatctgtattgcagcctccaacacctgcagaaactggagggcattttacactttcatcatccactattagtacacataattatgaagaaattcctatggatacatttattgttagcacaaaccctaacacagtaactagtagcacacccataccggggtctcgcccagtggcacgcctaggattatatagtcgcacaacacaacaagttaaggttgtggaccctgcttttgtaaccgctcccactaaacttattacatatgataatcctgcatatgaaggtatagatgtggataatacattttattttcctagtaatgataatagtattaatatagctccagatcctgactttttggatatagttgctttacataggccagcattaacctctaggcgtactggcattagatacagtagaattggtaataaacaaacactacgtactcgtagtggaaaatctataggtgctaaggtacattattattatgatttaagtactattaatcctgcagaagaaatagaattacaaactataacaccttctacatatacaaccacttcccatgcagcctcaccaacttctattaataatggattatatgatatttatgcagatgactttattacagatacttctacaaccccagtaccagctataccctctacatccttatcaggttatattcctgcaaatacaacaattccttttggtggtgcatacaatattcctttagtatcaggacctgatatacctattaatacaactgaccaaactccttcattaattcctatagttccagggtctccacaatatacaattattgctgatggaggtgacttttatttacatcctagttattacatgttacgaaaacgacgtaaacgtttaccatattttttttcagatgtctctttggctgcctagtgaggccactgtctacttgcctcctgtcccagtatctaaagttgtaagcacggatgaatatgttgcacgcacaaacatatattatcatgcaggaacatccagactacttgcagttggacatccctattttcctattaaaaaacctaacaataacaaaatattagttcctaaagtatcaggattacaatacagggtatttagaatatatttacctgaccccaataagtttggttttcctgacacctcattttacaatccagatacacagcggctggtttgggcctgtgtaggtgttgaggtaggtcgtggtcagccattaggtgtgggcattagtggccatcctttattaaataaattggatgacacagaaaatgctagtgcttatgcagcaaatgcaggtgtggataatagagaatgtatatctatggattacaaacaaacacaattgtgtttaattggttgcaaaccacctataggggaacactggggcaaaggatccccatgtaacaatgttgcagtaactccaggtgattgtccaccattagagttaataaacacagttattcaggatggtgatatggttgataccggctttggtgctatggactttactacattacaggctaacaaaagtgaagttccactggatatttgtacatctatttgcaaatatccagattatattaaaatggtgtcagaaccatatggcgacagcttatttttttatttacgaagggaacaaatgtttgttagacatttatttaatagggctggtgctgttggtgaaaatgtaccagacgatttatacattaaaggctctgggtctactgcaaatttagccagttcaaattattttcctacacctagtggttctatggttacctctgatgcccaaatatttaataaaccttattggttacaacgagcacagggccacaataatggcatttgttggggtaaccaactatttgttactgttgttgatactacacgcagtacaaatatgtcattatgtgctgccatatctacttcagaacctacatataaaaatactaactttaaagagtacctacgacatggggaggaatatgatttacagtttatttttcaactgtgcaaaataaccttaactgcagacgttatgtcatacatacattctatgaattccactattttggaggactggaattttggtttacaacctcctccaggaggcacactagaagatacttataggtttgtaacatcccaggcaattgcttgtcaaaaacatacacctccagcacctaaagaagatccccttaaaaaatatactttttgggaagtaaatttaaaagaaaagttttctgcagacctagatcagtttcctttaggacgcaaatttttactacaagcaggatttaaggccaaaccaaaatttacattaggaaaacgaaaagctacacccaccacctcatctacctctacaactgctaaacgcaaaaaacgtaagctgtaagtattgtatgtatgttgaattagtgttgtttgttgtttatatgtttgtatgtgcttgtatgtgcttgtaaatattacgttgtatgtgtgtttgtatgtatggtataataaacacgtgtgtatgtgtttttaaatgcttgtgtaactattgtgtcatgcaacataaataaacttattgtttcatcacctactaattgtgttgtggttattcattgtatataaactatatttgctacatcttgtttttgttttatatatactatattttgtagcgccagcggccattttgtagcttcaaccgaattcggttgcatgctttttggcacaaactgtatttttttaaatagttctatgtcagcaactatagtttaaacttgtacgtttcctgcttgccatgcgtgccaaatccctgttttcctgacctgcactgcttgccaaccattccattgttttttacactgcactatgtgcaactactgaatcactatgtacattgtgtcatataaaataaattactatgcgccaacgccttaaataccgctgttaggcacatatttttggcttgttttaactcacctaattgcatagttggcataaggtttaaacttttaaggccaactaaatgtcaccttagttcatacatgaactgtgtaaaggttagtcatacattgttcatttgtaaaactgcacatgggtgtgtgcaaaccgttttgggttacacatttacaaggaacttatataataatactaaactacaataattcatgtataaaactaagggcgtaaccgaaatcggttgaaccgaaaccggttagtataaaagcagacattttatgcaccaaaagagaactgcaatgtttcaggacccacaggagcgacccagaaagttaccacatttatgcacagagctgcaaacaactatacatgatataatattagaatgtgtgtactgcaagcaacagttactgcgacgtgaggtatatgactttgcttttcgggatttatgcatagtatatagagatgggaatccatatgctgtgtgtgataaatgtttaaagttttattctaaaattagtgagtatagatattattgttatagtgtgtatggaacaacattagaacagcaatacaacaaaccgttgtgtgatttgttaattaggtgtattaactgtcaaaagccactgtgtcctgaagaaaagcaaagacatctggacaaaaagcaaagattccataatataaggggtcggtggaccggtcgatgtatgtcttgttgcagatcatcgagaacacgtagagaaacccagctgtaatcatgcatggagatacacctacattgcatgaatatatgttagatttgcaaccagagacaactgatctctactgttatgagcaattaaatgacagctcagaggaggaggatgaaatagatggtccagctggacaagcagaaccggacagagcccattacaatattgtaaccttctgttgcaagtgtgactctacgcttcggttgtgcgtacaaagcacacacgtagacattcgtacgttggaagacctgttaatgggcacactaggaattgtgtgccccatctgttctcagaaaccataatctacc

SEQ ID NO: 94 - DNA, 7906 bp, Homo sapiens
  source 1..7906: mol_type = genomic DNA; note = UNCseq2772
atggctgatcctgcaggtaccaatggggaagagggtacgggatgtaatggatggttttatgtagaggctgtagtggaaaaaaaaacaggggatgctatatcagatgacgagaacgaaaatgacagtgatacaggtgaagatttggtagattttatagtaaatgataatgattatttaacacaggcagaaacagagacagcacatgcgttgtttactgcacaggaagcaaaacaacatagagatgcagtacaggttctaaaacgaaagtatttgggtagtccacttagtgatattagtggatgtgtagacaataatattagtcctagattaaaagctatatgtatagaaaaacaaagtagagctgcaaaaaggagattatttgaaagcgaagacagcgggtatggcaatactgaagtggaaactcagcagatgttacaggtagaagggcgccatgagactgaaacaccatgtagtcagtatagtggtggaagtgggggtggttgcagtcagtacagtagtggaagtgggggagagggtgttagtgaaagacacactatatgccaaacaccacttacaaatattttaaatgtactaaaaactagtaatgcaaaggcagcaatgttagcaaaatttaaagagttatacggggtgagtttttcagaattagtaagaccatttaaaagtaataaatcaacgtgttgcgattggtgtattgctgcatttggacttacacccagtatagctgacagtataaaaacactattacaacaatattgtttatatttacacattcaaagtttagcatgttcatggggaatggttgtgttactattagtaagatataaatgtggaaaaaatagagaaacaattgaaaaattgctgtctaaactattatgtgtgtctccaatgtgtatgatgatagagcctccaaaattgcgtagtacagcagcagcattatattggtataaaacaggtatatcaaatattagtgaagtgtatggagacacgccagaatggatacaaagacaaacagtattacaacatagttttaatgattgtacatttgaattatcacagatggtacaatgggcctacgataatgacatagtagacgatagtgaaattgcatataaatatgcacaattggcagacactaatagtaatgcaagtgcctttctaaaaagtaattcacaggcaaaaattgtaaaggattgtgcaacaatgtgtagacattataaacgagcagaaaaaaaacaaatgagtatgagtcaatggataaaatatagatgtgatagggtagatgatggaggtgattggaagcaaattgttatgtttttaaggtatcaaggtgtagagtttatgtcatttttaactgcattaaaaagatttttgcaaggcatacctaaaaaaaattgcatattactatatggtgcagctaacacaggtaaatcattatttggtatgagtttaatgaaatttctgcaagggtctgtaatatgttttgtaaattctaaaagccatttttggttacaaccattagcagatgccaaaataggtatgttagatgatgctacagtgccctgttggaactacatagatgacaatttaagaaatgcattggatggaaatttagtttctatggatgtaaagcatagaccattggtacaactaaaatgccctccattattaattacatctaacattaatgctggtacagattctaggtggccttatttacataatagattggtggtgtttacatttcctaatgagtttccatttgacgaaaacggaaatccagtgtatgagcttaatgataagaactggaaatcctttttctcaaggacgtggtccagattaagtttgcacgaggacgaggacaaggaaaacgatggagactctttgccaacgtttaaatgtgtgtcaggacaaaatactaacacattatgaaaatgatagtacagacctacgtgaccatatagactattggaaacacatgcgcctagaatgtgctatttattacaaggccagagaaatgggatttaaacatattaaccaccaggtggtgccaacactggctgtatcaaagaataaagcattacaagcaattgaactgcaactaacgttagaaacaatatataactcacaatatagtaatgaaaagtggacattacaagacgttagccttgaagtgtatttaactgcaccaacaggatgtataaaaaaacatggatatacagtggaagtgcagtttgatggagacatatgcaatacaatgcattatacaaactggacacatatatatatttgtgaagaagcatcagtaactgtggtagagggtcaagttgactattatggtttatattatgttcatgaaggaatacgaacatattttgtgcagtttaaagatgatgcagaaaaatatagtaaaaataaagtatgggaagttcatgcgggtggtcaggtaatattatgtcctacatctgtgtttagcagcaacgaagtatcctctcctgaaattattaggcagcacttggccaaccaccccgccgcgacccataccaaagccgtcgccttgggcaccgaagaaacacagacgactatccagcgaccaagatcagagccagacaccggaaacccctgccacaccactaagttgttgcacagagactcagtggacagtgctccaatcctcactgcatttaacagctcacacaaaggacggattaactgtaatagtaacactacacccatagtacatttaaaaggtgatgctaatactttaaaatgtttaagatatagatttaaaaagcattgtacattgtatactgcagtgtcgtctacatggcattggacaggacataatgtaaaacataaaagtgcaattgttacacttacatatgatagtgaatggcaacgtgaccaatttttgtctcaagttaaaataccaaaaactattacagtgtctactggatttatgtctatatgacaaatcttgatactgcatccacaacattactggcgtgctttttgctttgcttttgtgtgcttttgtgtgtctgcctattaatacgtccgctgcttttgtctgtgtctacatacacatcattaataatattggtattactattgtggataacagcagcctctgcgtttaggtgttttattgtatatattatatttgtttatataccattatttttaatacatacacatgcacgctttttaattacataatgtatatgtacataatgtaattgttacatataattgttgtataccataacttactattttttcttttttattttcatatataatttttttttttgtttgtttgtttgttttttaataaactgttattacttaacaatgcgacacaaacgttctgcaaaacgcacaaaacgtgcatcggctacccaactttataaaacatgcaaacaggcaggtacatgtccacctgacattatacctaaggttgaaggcaaaactattgctgatcaaatattacaatatggaagtatgggtgtattttttggtgggttaggaattggaacagggtcgggtacaggcggacgcactgggtatattccattgggaacaaggcctcccacagctacagatacacttgctcctgtaagaccccctttaacagtagatcctgtgggcccttctgatccttctatagtttctttagtggaagaaactagttttattgatgctggtgcaccaacatctgtaccttccattcccccagatgtatcaggatttagtattactacttcaactgataccacacctgctatattagatattaataatactgttactactgttactacacataataatcccactttcactgacccatctgtattgcagcctccaacacctgcagaaactggagggcattttacactttcatcatccactattagtacacataattatgaagaaattcctatggatacatttattgttagcacaaaccctaacacagtaactagtagcacacccataccagggtctcgcccagtggcacgcctaggattatatagtcgcacaacacaacaagttaaagttgtagaccctgcttttgtaaccactcccactaaacttattacatatgataatcctgcatatgaaggtatagatgtggataatacattatatttttctagtaatgataatagtattaatatagctccagatcctgactttttggatatagttgctttacataggccagcattaacctctaggcgtactggcattaggtacagtagaattggtaataaacaaacactacgtactcgtagtggaaaatctataggtgctaaggtacattattattatgatttcagtactattgatcctgcagaagaaatagaattacaaactataacaccttctacatatactaccacttcacatgcagcctcacctacttctattaataatggattatatgatatttatgcagatgactttattacagatacttctacaaccccggtaccatctgtaccctctacatctttatcaggttatattcctgcaaatacaacaattccttttggtggtgcatacaatattcctttagtatctggtcctgatatacccattaatataactgaccaagctccttcattaattcctatagttccagggtctccacaatatacaattattgctgatgcaggtgacttttatttacatcctagttattacatgttacgaaaacgacgtaaacgtttaccatattttttttcagatgtctctttggctgcctagtgaggccactgtctacttgcctcctgtcccagtatctaaggttgtaagcacggatgaatatgttgcacgcacaaacatatattatcatgcaggaacatccagactacttgcagttggacatccctattttcctattaaaaaacctaacaataacaaaatattagttcctaaagtatcaggattacaatacagggtatttagaatacatttacctgaccccaataagtttggttttcctgacacctcattttataatccagatacacagcggctggtttgggcctgtgtaggtgttgaggtaggtcgtggtcagccattaggtgtgggcattagtggccatcctttattaaataaattggatgacacagaaaatgctagtgcttatgcagcaaatgcaggtgtggataatagagaatgtatatctatggattacaaacaaacacaattgtgtttaattggttgcaaaccacctataggggaacactggggcaaaggatccccatgtaccaatgttgcagtaaatccaggtgattgtccaccattagagttaataaacacagttattcaggatggtgatatggttgatactggctttggtgctatggactttactacattacaggctaacaaaagtgaagttccactggatatttgtacatctatttgcaaatatccagattatattaaaatggtgtcagaaccatatggcgacagcttatttttttatttacgaagggaacaaatgtttgttagacatttatttaatagggctggtactgttggtgaaaatgtaccagacgatttatacattaaaggctctgggtctactgcaaatttagccagttcaaattattttcctacacctagtggttctatggttacctctgatgcccaaatattcaataaaccttattggttacaacgagcacagggccacaataatggcatttgttggggtaaccaactatttgttactgttgttgatactacacgcagtacaaatatgtcattatgtgctgccatatctacttcagaaactacatataaaaatactaactttaaggagtacctacgacatggggaggaatatgatttacagtttatttttcaactgtgcaaaataaccttaactgcagacgttatgacatacatacattctatgaattccactattttggaggactggaattttggtctacaacctcccccaggaggcacactagaagatacttataggtttgtaacatcccaggcaattgcttgtcaaaaacatacacctccagcacctaaagaagatccccttaaaaaatacactttttgggaagtaaatttaaaggaaaagttttctgcagacctagatcagtttcctttaggacgcaaatttttactacaagcaggattgaaggccaaaccaaaatttacattaggaaaacgaaaagctacacccaccacctcatctacctctacaactgctaaacgcaaaaaacgtaagctgtaagtattgtatgtatgttgcattagtgttgtttgttgtgtatatgtttgtatgtgcttgtatgtgcttgtaaatattaagttgtatgtgtgtttgtatgtatggtataataaacacgtgtgtatgtgtttttaaatgcttgtgtaactattgtgtcatgcaacataaataaacttattgtttcaacacctactaattgtgttgtggttattcattgtatataaactatatttgctacatcctgtttttgttttatatatactatattttgtagcgccagcggccattttgtagcttcaaccgaattcggttgcatgctttttggcacaaaatgtgtttttttaaatagttctatgtcagcaactatggtttaaacttgtacgtttcctgcttgccatgcgtgccaaatccctgttttcctgacctgcactgcttgccaaccattccattgttttttacactgcactatgtgcaactactgaatcactatgtacattgtgtcatataaaataaatcactatgcgccaacgccttacataccgctgttaggcacatatttttggcttgttttaactaacctaattgcatatttggcataaggtttaaacttctaaggccaactaaatgtcaccctagttcatacatgaactgtgtaaaggttagtcatacattgttcatttgtaaaactgcacatgggtgtgtgcaaaccgttttgggttacacatttacaagcaacttatataataatactaaactacaataattcatgtataaaactaagggcgtaaccgaaatcggttgaaccgaaaccggttagtataaaagcagacattttatgcaccaaaagagaactgcaatgtttcaggacccacaggagcgacccagaaagttaccacagttatgcacagagctgcaaacaactatacatgatataatattagaatgtgtgtactgcaagcaacagttactgcgacgtgaggtatatgactttgcttttcgggatttatgcatagtatatagagatgggaatccatatgctgtatgtgataaatgtttaaagttttattctaaaattagtgagtatagacattattgttatagtttgtatggaacaacattagaacagcaatacaacaaaccgttgtgtgatttgttaattaggtgtattaactgtcaaaagccactgtgtcctgaagaaaagcaaagacatctggacaaaaagcaaagattccataatataaggggtcggtggaccggtcgatgtatgtcttgttgccgatcatcaagaacacgtagagaaacccagctgtaatcatgcatggagatacacctacattgcatgaatatatgttagatttgcaaccagagacaactgatctctactgttatgagcaattaaatgacagctcagaggaggaggatgaaatagatggtccagctggacaagcagaaccggacagagcccattacaatattgtaaccttttgttgcaagtgtgactctacgcttcggttgtgcgtacaaagcacacacgtagacattcgtactttggaagacctgttaatgggcacactaggaattgtgtgccccatctgttctcagaaaccataatctacc

SEQ ID NO: 95 - DNA, 7906 bp, Homo sapiens
  source 1..7906: mol_type = genomic DNA; note = UNCseq2773
atggctgatcctgcaggtaccaatggggaagagggtacgggatgtaatggatggttttatgtagaggctgtagtggaaaaaaaaacaggggatgctatatcagatgacgagaacgaaaatgacagtgatacaggtgaagatttggtagattttatagtaaatgataatgattatttaacacaggcagaaacagagacagcacatgcgttgtttactgcacaggaagcaaaacaacatagagatgcagtacaggttctaaaacgaaagtatttgggtagtccacttagtgatattagtggatgtgtagacaataatattagtcctagattaaaagctatatgtatagaaaaacaaagtagagctgcaaaaaggagattatttgaaagcgaagacagcgggtatggcaatactgaagtggaaactcagcagatgttacaggtagaagggcgccatgagactgaaacaccatgtagtcagtatagtggtggaagtgggggtggttgcagtcagtacagtagtggaagtgggggagagggtgttagtgaaagacacactatatgccaaacaccacttacaaatattttaaatgtactaaaaactagtaatgcaaaggcagcaatgttagcaaaatttaaagagttatacggggtgagtttttcagaattagtaagaccatttaaaagtaataaatcaacgtgttgcgattggtgtattgctgcattcggacttacacccagtatagctgacagtataaaaacactattacaacaatattgtttatatttacacattcaaagtttagcatgttcatggggaatggttgtgttactattagtaagatataaatgtggaaaaaatagagaaacaattgaaaaattgctgtctaaactattatgtgtgtctccaatgtgtatgatgatagagcctccaaaattgcgtagtacagcagcagcattatattggtataaaacaggtatatcaaatattagtgaagtgtatggagacacgccagaatggatacaaagacaaacagtattacaacatagttttaatgattgtacatttgaattatcacagatggtacaatgggcctacgataatgacatagtagacgatagtgaaattgcatataaatatgcacaattggcagacactaatagtaatgcaagtgcctttctaaaaagtaattcacaggcaaaaattgtaaaggattgtgcaacaatgtgtagacattataaacgagcagaaaaaaaacaaatgagtatgagtcaatggataaaatatagatgtgatagggtagatgatggaggtgattggaagcaaattgttatgtttttaaggtatcaaggtgtagagtttatgtcatttttaactgcattaaaaagatttttgcaaggcatacctaaaaaaaattgcatattactatatggtgcagctaacacaggtaaatcattatttggtatgagtttaatgaaatttctgcaagggtctgtaatatgttttgtaaattctaaaagccatttttggttacaaccattagcagatgccaaaataggtatgttagatgatgctacagtgccctgttggaactacatagatgacaatttaagaaatgcattggatggaaatttagtttctatggatgtaaagcatagaccattggtacaactaaaatgccctccattattaattacatctaacattaatgctggtacagattctaggtggccttatttacataatagattggtggtgtttacatttcctaatgagtttccatttgacgaaaacggaaatccagtgtatgagcttaatgataagaactggaaatcctttttctcaaggacgtggtccagattaagtttgcacgaggacgaggacaaggaaaacgatggagactctttgccaacgtttaaatgtgtgtcaggacaaaatactaacacattatgaaaatgatagtacagacctacgtgaccatatagactattggaaacacatgcgcctagaatgtgctatttattacaaggccagagaaatgggatttaaacatattaaccaccaggtggtgccaacactggctgtatcaaagaataaagcattacaagcaattgaactgcaactaacgttagaaacaatatataactcacaatatagtaatgaaaagtggacattacaagacgttagccttgaagtgtatttaactgcaccaacaggatgtataaaaaaacatggatatacagtggaagtgcagtttgatggagacatatgcaatacaatgcattatacaaactggacacatatatatatttgtgaagaagcatcagtaactgtggtagagggtcaagttgactattatggtttatattatgttcatgaaggaatacgaacatattttgtgcagtttaaagatgatgcagaaaaatatagtaaaaataaagtatgggaagttcatgcgggtggtcaggtaatattatgtcctacatctgtgtttagcagcaacgaagtatcctctcctgaaattattaggcagcacttggccaaccaccccgccgcgacccataccaaagccgtcgccttgggcaccgaagaaacacagacgactatccagcgaccaagatcagagccagacaccggaaacccctgccacaccactaagttgttgcacagagactcagtggacagtgctccaatcctcactgcatttaacagctcacacaaaggacggattaactgtaatagtaacactacacccatagtacatttaaaaggtgatgctaatactttaaaatgtttaagatatagatttaaaaagcattgtacattgtatactgcagtgtcgtctacatggcattggacaggacataatgtaaaacataaaagtgcaattgttacacttacatatgatagtgaatggcaacgtgaccaatttttgtctcaagttaaaataccaaaaactattacagtgtctactggatttatgtctatatgacaaatcttgatactgcatccacaacattactggcgtgctttttgctttgcttttgtgtgcttttgtgtgtctgcctattaatacgtccgctgcttttgtctgtgtctacatacacatcattaataatattggtattactattgtggataacagcagcctctgcgtttaggtgttttattgtatatattatatttgtttatataccattatttttaatacatacacatgcacgctttttaattacataatgtatatgtacataatgtaattgttacatataattgttgtataccataacttactattttttcttttttattttcatatataatttttttttttgtttgtttgtttgttttttaataaactgttattacttaacaatgcgacacaaacgttctgcaaaacgcacaaaacgtgcatcggctacccaactttataaaacatgcaaacaggcaggtacatgtccacctgacattatacctaaggttgaaggcaaaactattgctgatcaaatattacaatatggaagtatgggtgtattttttggtgggttaggaattggaacagggtcgggtacaggcggacgcactgggtatattccattgggaacaaggcctcccacagctacagatacacttgctcctgtaagaccccctttaacagtagatcctgtgggcccttctgatccttctatagtttctttagtggaagaaactagttttattgatgctggtgcaccaacatctgtaccttccattcccccagatgtatcaggatttagtattactacttcaactgataccacacctgctatattagatattaataatactgttactactgttactacacataataatcccactttcactgacccatctgtattgcagcctccaacacctgcagaaactggagggcattttacactttcatcatccactattagtacacataattatgaagaaattcctatggatacatttattgttagcacaaaccctaacacagtaactagtagcacacccataccagggtctcgcccagtggcacgcctaggattatatagtcgcacaacacaacaagttaaagttgtagaccctgcttttgtaaccactcccactaaacttattacatatgataatcctgcatatgaaggtatagatgtggataatacattatatttttctagtaatgataatagtattaatatagctccagatcctgactttttggatatagttgctttacataggccagcattaacctctaggcgtactggcattaggtacagtagaattggtaataaacaaacactacgtactcgtagtggaaaatctataggtgctaaggtacattattattatgatttcagtactattgatcctgcagaagaaatagaattacaaactataacaccttctacatatactaccacttcacatgcagcctcacctacttctattaataatggattatatgatatttatgcagatgactttattacagatacttctacaaccccggtaccatctgtaccctctacatctttatcaggttatattcctgcaaatacaacaattccttttggtggtgcatacaatattcctttagtatcaggtcctgatatacccattaatataactgaccaagctccttcattaattcctatagttccagggtctccacaatatacaattattgctgatgcaggtgacttttatttacatcctagttattacatgttacgaaaacgacgtaaacgtttaccatattttttttcagatgtctctttggctgcctagtgaggccactgtctacttgcctcctgtcccagtatctaaggttgtaagcacggatgaatatgttgcacgcacaaacatatattatcatgcaggaacatccagactacttgcagttggacatccctattttcctattaaaaaacctaacaataacaaaatattagttcctaaagtatcaggattacaatacagggtatttagaatacatttacctgaccccaataagtttggttttcctgacacctcattttataatccagatacacagcggctggtttgggcctgtgtaggtgttgaggtaggtcgtggtcagccattaggtgtgggcattagtggccatcctttattaaataaattggatgacacagaaaatgctagtgcttatgcagcaaatgcaggtgtggataatagagaatgtatatctatggattacaaacaaacacaattgtgtttaattggttgcaaaccacctataggggaacactggggcaaaggatccccatgtaccaatgttgcagtaaatccaggtgattgtccaccattagagttaataaacacagttattcaggatggtgatatggttgatactggctttggtgctatggactttactacattacaggctaacaaaagtgaagttccactggatatttgtacatctatttgcaaatatccagattatattaaaatggtgtcagaaccatatggcgacagcttatttttttatttacgaagggaacaaatgtttgttagacatttatttaatagggctggtactgttggtgaaaatgtaccagacgatttatacattaaaggctctgggtctactgcaaatttagccagttcaaattattttcctacacctagtggttctatggttacctctgatgcccaaatattcaataaaccttattggttacaacgagcacagggccacaataatggcatttgttggggtaaccaactatttgttactgttgttgatactacacgcagtacaaatatgtcattatgtgctgccatatctacttcagaaactacatataaaaatactaactttaaggagtacctacgacatggggaggaatatgatttacagtttatttttcaactgtgcaaaataaccttaactgcagacgttatgacatacatacattctatgaattccactattttggaggactggaattttggtctacaacctcccccaggaggcacactagaagatacttataggtttgtaacatcccaggcaattgcttgtcaaaaacatacacctccagcacctaaagaagatccccttaaaaaatacactttttgggaagtaaatttaaaggaaaagttttctgcagacctagatcagtttcctttaggacgcaaatttttactacaagcaggattgaaggccaaaccaaaatttacattaggaaaacgaaaagctacacccaccacctcatctacctctacaactgctaaacgcaaaaaacgtaagctgtaagtattgtatgtatgttgaattagtgttgtttgttgtgtatatgtttgtatgtgcttgtatgtgcttgtaaatattaagttgtatgtgtgtttgtatgtatggtataataaacacgtgtgtatgtgtttttaaatgcttgtgtaactattgtgtcatgcaacataaataaacttattgtttcaacacctactaattgtgttgtggttattcattgtatataaactatatttgctacatcctgtttttgttttatatatactatattttgtagcgccagcggccattttgtagcttcaaccgaattcggttgcatgctttttggcacaaaatgtgtttttttaaatagttctatgtcagcaactatggtttaaacttgtacgtttcctgcttgccatgcgtgccaaatccctgttttcctgacctgcactgcttgccaaccattccattgttttttacactgcactatgtgcaactactgaatcactatgtacattgtgtcatataaaataaatcactatgcgccaacgccttacataccgctgttaggcacatatttttggcttgttttaactaacctaattgcatatttggcataaggtttaaacttctaaggccaactaaatgtcaccctagttcatacatgaactgtgtaaaggttagtcatacattgttcatttgtaaaactgcacatgggtgtgtgcaaaccgttttgggttacacatttacaagcaacttatataataatactaaactacaataattcatgtataaaactaagggcgtaaccgaaatcggttgaaccgaaaccggttagtataaaagcagacattttatgcaccaaaagagaactgcaatgtttcaggacccacaggagcgacccagaaagttaccacagttatgcacagagctgcaaacaactatacatgatataatattagaatgtgtgtactgcaagcaacagttactgcgacgtgaggtatatgactttgcttttcgggatttatgcatagtatatagagatgggaatccatatgctgtatgtgataaatgtttaaagttttattctaaaattagtgagtatagacattattgttatagtttgtatggaacaacattagaacagcaatacaacaaaccgttgtgtgatttgttaattaggtgtattaactgtcaaaagccactgtgtcctgaagaaaagcaaagacatctggacaaaaagcaaagattccataatataaggggtcggtggaccggtcgatgtatgtcttgttgcagatcatcaagaacacgtagagaaacccagctgtaatcatgcatggagatacacctacattgcatgaatatatgttagatttgcaaccagagacaactgatctctactgttatgagcaattaaatgacagctcagaggaggaggatgaaatagatggtccagctggacaagcagaaccggacagagcccattacaatattgtaaccttttgttgcaagtgtgactctacgcttcggttgtgcgtacaaagcacacacgtagacattcgtactttggaagacctgttaatgggcacactaggaattgtgtgccccatctgttctcagaaaccataatctacc

SEQ ID NO: 96 - DNA, 7906 bp, Homo sapiens
  source 1..7906: mol_type = genomic DNA; note = UNCseq2774
atggctgatcctgcaggtaccaatggggaagagggtacgggatgtaatggatggttttatgtagaggctgtagtggaaaaaaaaacaggggatgctatatcagatgacgagaacgaaaatgacagtgatacaggtgaagatttggtagattttatagtaaatgataatgattatttaacacaggcagaaacagagacagcacatgcgttgtttactgcacaggaagcaaaacaacatagagatgcagtacaggttctaaaacgaaagtatttgggtagtccacttagtgatattagtggatgtgtagacaataatattagtcctagattaaaagctatatgtatagaaaaacaaagtagagctgcaaaaaggagattatttgaaagcgaagacagcgggtatggcaatactgaagtggaaactcagcagatgttacaggtagaagggcgccatgagactgaaacaccatgtagtcagtatagtggtggaagtgggggtggttgcagtcagtacagtagtggaagtgggggagagggtgttagtgaaagacacactatatgccaaacaccacttacaaatattttaaatgtactaaaaactagtaatgcaaaggcagcaatgttagcaaaatttaaagagttatacggggtgagtttttcagaattagtaagaccatttaaaagtaataaatcaacgtgttgcgattggtgtattgctgcattcggacttacacccagtatagctgacagtataaaaacactattacaacaatattgtttatatttacacattcaaagtttagcatgttcatggggaatggttgtgttactattagtaagatataaatgtggaaaaaatagagaaacaattgaaaaattgctgtctaaactattatgtgtgtctccaatgtgtatgatgatagagcctccaaaattgcgtagtacagcagcagcattatattggtataaaacaggtatatcaaatattagtgaagtgtatggagacacgccagaatggatacaaagacaaacagtattacaacatagttttaatgattgtacatttgaattatcacagatggtacaatgggcctacgataatgacatagtagacgatagtgaaattgcatataaatatgcacaattggcagacactaatagtaatgcaagtgcctttctaaaaagtaattcacaggcaaaaattgtaaaggattgtgcaacaatgtgtagacattataaacgagcagaaaaaaaacaaatgagtatgagtcaatggataaaatatagatgtgatagggtagatgatggaggtgattggaagcaaattgttatgtttttaaggtatcaaggtgtagagtttatgtcatttttaactgcattaaaaagatttttgcaaggcatacctaaaaaaaattgcatattactatatggtgcagctaacacaggtaaatcattatttggtatgagtttaatgaaatttctgcaagggtctgtaatatgttttgtaaattctaaaagccatttttggttacaaccattagcagatgccaaaataggtatgttagatgatgctacagtgccctgttggaactacatagatgacaatttaagaaatgcattggatggaaatttagtttctatggatgtaaagcatagaccattggtacaactaaaatgccctccattattaattacatctaacattaatgctggtacagattctaggtggccttatttacataatagattggtggtgtttacatttcctaatgagtttccatttgacgaaaacggaaatccagtgtatgagcttaatgataagaactggaaatcctttttctcaaggacgtggtccagattaagtttgcacgaggacgaggacaaggaaaacgatggagactctttgccaacgtttaaatgtgtgtcaggacaaaatactaacacattatgaaaatgatagtacagacctacgtgaccatatagactattggaaacacatgcgcctagaatgtgctatttattacaaggccagagaaatgggatttaaacatattaaccaccaggtggtgccaacactggctgtatcaaagaataaagcattacaagcaattgaactgcaactaacgttagaaacaatatataactcacaatatagtaatgaaaagtggacattacaagacgttagccttgaagtgtatttaactgcaccaacaggatgtataaaaaaacatggatatacagtggaagtgcagtttgatggagacatatgcaatacaatgcattatacaaactggacacatatatatatttgtgaagaagcatcagtaactgtggtagagggacaagttgactattatggtttatattatgttcatgaaggaatacgaacatattttgtgcagtttaaagatgatgcagaaaaatatagtaaaaataaagtatgggaagttcatgcgggtggtcaggtaatattatgtcctacatctgtgtttagcagcaacgaagtatcctctcctgaaattattaggcagcacttggccaaccaccccgccgcgacccataccaaagccgtcgccttgggcaccgaagaaacacagacgactatccagcgaccaagatcagagccagacaccggaaacccctgccacaccactaagttgttgcacagagactcagtggacagtgctccaatcctcactgcatttaacagcgcacacaaaggacggattaactgtaatagtaacactacacccatagtacatttaaaaggtgatgctaatactttaaaatgtttaagatatagatttaaaaagcattgtacattgtatactgcagtgtcgtctacatggcattggacaggacataatgtaaaacataaaagtgcaattgttacacttacatatgatagtgaatggcaacgtgaccaatttttgtctcaagttaaaataccaaaaactattacagtgtctactggatttatgtctatatgacaaatcttgatactgcatccacaacattactggcgtgctttttgctttgcttttgtgtgcttttgtgtgtctgcctattaatacgtccgctgcttttgtctgtgtctacatacacatcattaataatattggtattactattgtggataacagcagcctctgcgtttaggtgttttattgtatatattatatttgtttatataccattatttttaatacatacacatgcacgctttttaattacataatgtatatgtacataatgtaattgttacatataattgttgtataccataacttactattttttcttttttattttcatatataatttttttttgtgtttgtttgtttgttttttaataaactgttatcacttaacaatgcgacacaaacgttctgcaaaacgcacaaaacgtgcatcggctacccaactttataaaacatgcaaacaggcaggtacatgtccacctgacattatacctaaggttgaaggcaaaactattgctgatcaaatattacaatatggaagtatgggtgtattttttggtgggttaggaattggcacagggtcgggtacaggcggacgcactgggtatattccattgggaacaaggcctcccacagctacagatacacttgctcctgtaagaccccctttaacagtagatcctgtgggcccttctgatccttctatagtttctttagtggaagaaactagttttattgatgctggtgcaccaacatctgtaccttccattcccccagatgtatcaggatttagtattactacttcaactgataccacacctgctatattagatattaataatactgttactactgttactacacataataatcccactttcactgacccatctgtattgcagcctccaacacctgcagaaactggagggcattttacactttcatcatccactattagtacacataattatgaagaaattcctatggatacatttattgttagcacaaaccctaacacagtaactagtagcacacccataccagggtctcgcccagtggcacgcctaggattatatagtcgcacaacacaacaagttaaagttgtagaccctgcttttgtaaccactcccactaaacttattacatatgataatcctgcatatgaaggtatagatgtggataatacattatatttttctagtaatgataatagtattaatatagctccagatcctgactttttggatatagttgctttacataggccagcattaacctctaggcgtactggcattaggtacagtagaattggtaataaacaaacactacgtactcgtagtggaaaatctataggtgctaaggtacattattattatgatttcagtactattgatcctgcagaagaaatagaattacaaactataacaccttctacatatactaccacttcacatgcagcctcacctacttctattaataatggattatatgatatttatgcagatgactttattacagatacttctacaaccccggtaccatctgtaccctctacatctttatcaggttatattcctgcaaatacaacaattccttttggtggtgcatacaatattcctttagtatcaggtcctgatatacccattaatataactgaccaagctccttcattaattcctatagttccagggtctccacaatatacaattattgctgatgcaggtgacttttatttacatcctagttattacatgttacgaaaacgacgtaaacgtttaccatattttttttcagatgtctctttggctgcctagtgaggccactgtctacttgcctcctgtcccagtatctaaggttgtaagcacggatgaatatgttgcacgcacaaacatatattatcatgcaggaacatccagactacttgcagttggacatccctattttcctattaaaaaacctaacaataacaaaatattagttcctaaagtatcaggattacaatacagggtatttagaatacatttacctgaccccaataagtttggttttcctgacacctcattttataatccagatacacagcggctggtttgggcctgtgtaggtgttgaggtaggtcgtggtcagccattaggtgtgggcattagtggccatcctttattaaataaattggatgacacagaaaatgctagtgcttatgcagcaaatgcaggtgtggataatagagaatgtatatctatggattacaaacaaacacaattgtgtttaattggttgcaaaccacctataggggaacactggggcaaaggatccccatgtaccaatgttgcagtaaatccaggtgattgtccaccattagagttaataaacacagttattcaggatggtgatatggttgatactggctttggtgctatggactttactacattacaggctaacaaaagtgaagttccactggatatttgtacatctatttgcaaatatccagattatattaaaatggtgtcagaaccatatggcgacagcttatttttttatttacgaagggaacaaatgtttgttagacatttatttaatagggctggtactgttggtgaaaatgtaccagacgatttatacattaaaggctctgggtctactgcaaatttagccagttcaaattattttcctacacctagtggttctatggttacctctgatgcccaaatattcaataaaccttattggttacaacgagcacagggccacaataatggcatttgttggggtaaccaactatttgttactgttgttgatactacacgcagtacaaatatgtcattatgtgctgccatatctacttcagaaactacatataaaaatactaactttaaggagtacctacgacatggggaggaatatgatttacagtttatttttcaactgtgcaaaataaccttaactgcagacgttatgacatacatacattctatgaattccactattttggaggactggaattttggtctacaacctcccccaggaggcacactagaagatacttataggtttgtaacatcccaggcaattgcttgtcaaaaacatacacctccagcacctaaagaagatccccttaaaaaatacactttttgggaagtaaatttaaaggaaaagttttctgcagacctagatcagtttcctttaggacgcaaatttttactacaagcaggattgaaggccaaaccaaaatttacattaggaaaacgaaaagctacacccaccacctcatctacctctacaactgctaaacgcaaaaaacgtaagctgtaagtattgtatgtatgttgaattagtgttgtttgttgtgtatatgtttgtatgtgcttgtatgtgcttgtaaatattaagttgtatgtgtgtttgtatgtatggtataataaacacgtgtgtatgtgtttttaaatgcttgtgtaactattgtgtcatgcaacataaataaacttattgtttcaacacctactaattgtgttgtggttattcattgtatatacactatatttgctacatcctgtttttgttttatatatactatattttgtagcgccagcggccattttgtagcttcaaccgaattcggttgcatgctttttggcacaaaatgtgtttttttaaatagttctatgtcagcaactatggtttaaacttgtacgtttcctgcttgccatgcgtgccaaatccctgttttcctgacctgcactgcttgccaaccattccattgttttttacactgcactatgtgcaactactgaatcactatgtacattgtgtcatataaaataaatcactatgcgccaacgccttacataccgctgttaggcacatatttttggcttgttttaactaacctaattgcatatttggcataaggtttaaacttctaaggccaactaaatgtcaccctagttcatacatgaactgtgtaaaggttagtcatacattgttcatttgtaaaactgcacatgggtgtgtgcaaaccgttttgggttacacatttacaagcaacttatataataatactaaactacaataattcatgtataaaactaagggcgtaaccgaaatcggttgaaccgaaaccggttagtataaaagcagacattttatgcaccaaaagagaactgcaatgtttcaggacccacaggagcgacccagaaagttaccacagttatgcacagagctgcaaacaactatacatgatataatattagaatgtgtgtactgcaagcaacagttactgcgacgtgaggtatatgactttgcttttcgggatttatgcatagtatatagagatgggaatccatatgctgtatgtgataaatgtttaaagttttattctaaaattagtgagtatagacattattgttatagtttgtatggaacaacattagaacagcaatacaacaaaccgttgtgtgatttgttaattaggtgtattaactgtcaaaagccactgtgtcctgaagaaaagcaaagacatctggacaaaaagcaaagattccataatataaggggtcggtggaccggtcgatgtatgtcttgttgcagatcatcaagaacacgtagagaaacccagctgtaatcatgcatggagatacacctacattgcatgaatatatgttagatttgcaaccagagacaactgatctctactgttatgagcaattaaatgacagctcagaggaggaggatgaaatagatggtccagctggacaagcagaaccggacagagcccattacaatattgtaaccttttgttgcaagtgtgactctacgcttcggttgtgcgtacaaagcacacacgtagacattcgtactttggaagacctgttaatgggcacactaggaattgtgtgccccatctgttctcagaaaccataatctacc

SEQ ID NO: 97 - DNA, 7906 bp, Homo sapiens
  source 1..7906: mol_type = genomic DNA; note = UNCseq2775
atggctgatcctgcaggtaccaatggggaagagggtacgggatgtaatggatggttttatgtagaggctgtagtggaaaaaaaaacaggggatgctatatcagatgacgagaacgaaaatgacagtgatacaggtgaagatttggtagattttatagtaaatgataatgattatttaacacaggcagaaacagagacagcacatgcgttgtttactgcacaggaagcaaaacaacatagagatgcagtacaggttctaaaacgaaagtatttgggtagtccacttagtgatattagtggatgtgtagacaataatattagtcctagattaaaagctatatgtatagaaaaacaaagtagagctgcaaaaaggagattatttgaaagcgaagacagcgggtatggcaatactgaagtggaaactcagcagatgttacaggtagaagggcgccatgagactgaaacaccatgtagtcagtatagtggtggaagtgggggtggttgcagtcagtacagtagtggaagtgggggagagggtgttagtgaaagacacactatatgccaaacaccacttacaaatattttaaatgtactaaaaactagtaatgcaaaggcagcaatgttagcaaaatttaaagagttatacggggtgagtttttcagaattagtaagaccatttaaaagtaataaatcaacgtgttgcgattggtgtattgctgcattcggacttacacccagtatagctgacagtataaaaacactattacaacaatattgtttatatttacacattcaaagtttagcatgttcatggggaatggttgtgttactattagtaagatataaatgtggaaaaaatagagaaacaattgaaaaattgctgtctaaactattatgtgtgtctccaatgtgtatgatgatagagcctccaaaattgcgtagtacagcagcagcattatattggtataaaacaggtatatcaaatattagtgaagtgtatggagacacgccagaatggatacaaagacaaacagtattacaacatagttttaatgattgtacatttgaattatcacagatggtacaatgggcctacgataatgacatagtagacgatagtgaaattgcatataaatatgcacaattggcagacactaatagtaatgcaagtgcctttctaaaaagtaattcacaggcaaaaattgtaaaggattgtgcaacaatgtgtagacattataaacgagcagaaaaaaaacaaatgagtatgagtcaatggataaaatatagatgtgatagggtagatgatggaggtgattggaagcaaattgttatgtttttaaggtatcaaggtgtagagtttatgtcatttttaactgcattaaaaagatttttgcaaggcatacctaaaaaaaattgcatattactatatggtgcagctaacacaggtaaatcattatttggtatgagtttaatgaaatttctgcaagggtctgtaatatgttttgtaaattctaaaagccatttttggttacaaccattagcagatgccaaaataggtatgttagatgatgctacagtgccctgttggaactacatagatgacaatttaagaaatgcattggatggaaatttagtttctatggatgtaaagcatagaccattggtacaactaaaatgccctccattattaattacatctaacattaatgctggtacagattctaggtggccttatttacataatagattggtggtgtttacatttcctaatgagtttccatttgacgaaaacggaaatccagtgtatgagcttaatgataagaactggaaatcctttttctcaaggacgtggtccagattaagtttgcacgaggacgaggacaaggaaaacgatggagactctttgccaacgtttaaatgtgtgtcaggacaaaatactaacacattatgaaaatgatagtacagacctacgtgaccatatagactattggaaacacatgcgcctagaatgtgctatttattacaaggccagagaaatgggatttaaacatattaaccaccaggtggtgccaacactggctgtatcaaagaataaagcattacaagcaattgaactgcaactaacgttagaaacaatatataactcacaatatagtaatgaaaagtggacattacaagacgttagccttgaagtgtatttaactgcaccaacaggatgtataaaaaaacatggatatacagtggaagtgcagtttgatggagacatatgcaatacaatgcattatacaaactggacacatatatatatttgtgaagaagcatcagtaactgtggtagagggacaagttgactattatggtttatattatgttcatgaaggaatacgaacatattttgtgcagtttaaagatgatgcagaaaaatatagtaaaaataaagtatgggaagttcatgcgggtggtcaggtaatattatgtcctacatctgtgtttagcagcaacgaagtatcctctcctgaaattattaggcagcacttggccaaccaccccgccgcgacccataccaaagccgtcgccttgggcaccgaagaaacacagacgactatccagcgaccaagatcagagccagacaccggaaacccctgccacaccactaagttgttgcacagagactcagtggacagtgctccaatcctcactgcatttaacagcgcacacaaaggacggattaactgtaatagtaacactacacccatagtacatttaaaaggtgatgctaatactttaaaatgtttaagatatagatttaaaaagcattgtacattgtatactgcagtgtcgtctacatggcattggacaggacataatgtaaaacataaaagtgcaattgttacacttacatatgatagtgaatggcaacgtgaccaatttttgtctcaagttaaaataccaaaaactattacagtgtctactggatttatgtctatatgacaaatcttgatactgcatccacaacattactggcgtgctttttgctttgcttttgtgtgcttttgtgtgtctgcctattaatacgtccgctgcttttgtctgtgtctacatacacatcattaataatattggtattactattgtggataacagcagcctctgcgtttaggtgttttattgtatatattatatttgtttatataccattatttttaatacatacacatgcacgctttttaattacataatgtatatgtacataatgtaattgttacatataattgttgtataccataacttactattttttcttttttattttcatatataatttttttttgtgtttgtttgtttgttttttaataaactgttattacttaacaatgcgacacaaacgttctgcaaaacgcacaaaacgtgcatcggctacccaactttataaaacatgcaaacaggcaggtacatgtccacctgacattatacctaaggttgaaggcaaaactattgctgatcaaatattacaatatggaagtatgggtgtattttttggtgggttaggaattggcacagggtcgggtacaggcggacgcactgggtatattccattgggaacaaggcctcccacagctacagatacacttgctcctgtaagaccccctttaacagtagatcctgtgggcccttctgatccttctatagtttctttagtggaagaaactagttttattgatgctggtgcaccaacatctgtaccttccattcccccagatgtatcaggatttagtattactacttcaactgataccacacctgctatattagatattaataatactgttactactgttactacacataataatcccactttcactgacccatctgtattgcagcctccaacacctgcagaaactggagggcattttacactttcatcatccactattagtacacataattatgaagaaattcctatggatacatttattgttagcacaaaccctaacacagtaactagtagcacacccataccagggtctcgcccagtggcacgcctaggattatatagtcgcacaacacaacaagttaaagttgtagaccctgcttttgtaaccactcccactaaacttattacatatgataatcctgcatatgaaggtatagatgtggataatacattatatttttctagtaatgataatagtattaatatagctccagatcctgactttttggatatagttgctttacataggccagcattaacctctaggcgtactggcattaggtacagtagaattggtaataaacaaacactacgtactcgtagtggaaaatctataggtgctaaggtacattattattatgatttcagtactattgatcctgcagaagaaatagaattacaaactataacaccttctacatatactaccacttcacatgcagcctcacctacttctattaataatggattatatgatatttatgcagatgactttattacagatacttctacaaccccggtaccatctgtaccctctacatctttatcaggttatattcctgcaaatacaacaattccttttggtggtgcatacaatattcctttagtatcaggtcctgatatacccattaatataactgaccaagctccttcattaattcctatagttccagggtctccacaatatacaattattgctgatgcaggtgacttttatttacatcctagttattacatgttacgaaaacgacgtaaacgtttaccatattttttttcagatgtctctttggctgcctagtgaggccactgtctacttgcctcctgtcccagtatctaaggttgtaagcacggatgaatatgttgcacgcacaaacatatattatcatgcaggaacatccagactacttgcagttggacatccctattttcctattaaaaaacctaacaataacaaaatattagttcctaaagtatcaggattacaatacagggtatttagaatacatttacctgaccccaataagtttggttttcctgacacctcattttataatccagatacacagcggctggtttgggcctgtgtaggtgttgaggtaggtcgtggtcagccattaggtgtgggcattagtggccatcctttattaaataaattggatgacacagaaaatgctagtgcttatgcagcaaatgcaggtgtggataatagagaatgtatatctatggattacaaacaaacacaattgtgtttaattggttgcaaaccacctataggggaacactggggcaaaggatccccatgtaccaatgttgcagtaaatccaggtgattgtccaccattagagttaataaacacagttattcaggatggtgatatggttgatactggctttggtgctatggactttactacattacaggctaacaaaagtgaagttccactggatatttgtacatctatttgcaaatatccagattatattaaaatggtgtcagaaccatatggcgacagcttatttttttatttacgaagggaacaaatgtttgttagacatttatttaatagggctggtactgttggtgaaaatgtaccagacgatttatacattaaaggctctgggtctactgcaaatttagccagttcaaattattttcctacacctagtggttctatggttacctctgatgcccaaatattcaataaaccttattggttacaacgagcacagggccacaataatggcatttgttggggtaaccaactatttgttactgttgttgatactacacgcagtacaaatatgtcattatgtgctgccatatctacttcagaaactacatataaaaatactaactttaaggagtacctacgacatggggaggaatatgatttacagtttatttttcaactgtgcaaaataaccttaactgcagacgttatgacatacatacattctatgaattccactattttggaggactggaattttggtctacaacctcccccaggaggcacactagaagatacttataggtttgtaacatcccaggcaattgcttgtcaaaaacatacacctccagcacctaaagaagatccccttaaaaaatacactttttgggaagtaaatttaaaggaaaagttttctgcagacctagatcagtttcctttgggacgcaaatttttactacaagcaggattgaaggccaaaccaaaatttacattaggaaaacgaaaagctacacccaccacctcatctacctctacaactgctaaacgcaaaaaacgtaagctgtaagtattgtatgtatgttgaattagtgttgtttgttgtgtatatgtttgtatgtgcttgtatgtgcttgtaaatattaagttgtatgtgtgtttgtatgtatggtataataaacacgtgtgtatgtgtttttaaatgcttgtgtaactattgtgtcatgcaacataaataaacttattgtttcaacacctactaattgtgttgtggttattcattgtatataaactatatttgctacatcctgtttttgttttatatatactatattttgtagcgccagcggccattttgtagcttcaaccgaattcggttgcatgctttttggcacaaaatgtgtttttttaaatagttctatgtcagcaactatggtttaaacttgtacgtttcctgcttgccatgcgtgccaaatccctgttttcctgacctgcactgcttgccaaccattccattgttttttacactgcactatgtgcaactactgaatcactatgtacattgtgtcatataaaataaatcactatgcgccaacgccttacataccgctgttaggcacatatttttggcttgttttaactaacctaattgcatatttggcataaggtttaaacttctaaggccaactaaatgtcaccctagttcatacatgaactgtgtaaaggttagtcatacattgttcatttgtaaaactgcacatgggtgtgtgcaaaccgttttgggttacacatttacaagcaacttatataataatactaaactacaataattcatgtataaaactaagggcgtaaccgaaatcggttgaaccgaaaccggttagtataaaagcagacattttatgcaccaaaagagaactgcaatgtttcaggacccacaggagcgacccagaaagttaccacagttatgcacagagctgcaaacaactatacatgatataatattagaatgtgtgtactgcaagcaacagttactgcgacgtgaggtatatgactttgcttttcgggatttatgcatagtatatagagatgggaatccatatgctgtatgtgataaatgtttaaagttttattctaaaattagtgagtatagacattattgttatagtttgtatggaacaacattagaacagcaatacaacaaaccgttgtgtgatttgttaattaggtgtattaactgtcaaaagccactgtgtcctgaagaaaagcaaagacatctggacaaaaagcaaagattccataatataaggggtcggtggaccggtcaatgtatgtcgtgttgcagatcatcaagaacacgtagagaaacccagctgtaatcatgcatggagatacacctacattgcatgaatatatgttagatttgcaaccagagacaactgatctctactgttatgagcaattaaatgacagctcagaggaggaggatgaaatagatggtccagctggacaagcagaaccggacagagcccattacaatattgtaaccttttgttgcaagtgtgactctacgcttcggttgtgcgtacaaagcacacacgtagacattcgtactttggaagacctgttaatgggcacactaggaattgtgtgccccatctgttctcagaaaccataatctacc

SEQ ID NO: 98 - DNA, 7906 bp, Homo sapiens
  source 1..7906: mol_type = genomic DNA; note = UNCseq2778
atggctgatcctgcaggtaccaatggggaagagggtacgggatgtaatggatggttttatgtagaggctgtagtggaaaaaaaaacaggggatgctatatcagatgacgagaacgaaaatgacagtgatacaggtgaagatttggtagattttatagtaaatgataatgattatttaacacaggcagaaacagagacagcacatgcgttgtttactgcacaggaagcaaaacaacatagagatgcagtacaggttctaaaacgaaagtatttgggtagtccacttagtgatattagtggatgtgtagacaataatattagtcctagattaaaagctatatgtatagaaaaacaaagtagagctgcaaaaaggagattatttgaaagcgaagacagcgggtatggcaatactgaagtggaaactcagcagatgttacaggtagaagggcgccatgagactgaaacaccatgtagtcagtatagtggtggaagtgggggtggttgcagtcagtacagtagtggaagtgggggagagggtgttagtgaaagacacactatatgccaaacaccacttacaaatattttaaatgtactaaaaactagtaatgcaaaggcagcaatgttagcaaaatttaaagagttatacggggtgagtttttcagaattagtaagaccatttaaaagtaataaatcaacgtgttgcgattggtgtattgctgcatttggacttacacccagtatagctgacagtataaaaacactattacaacaatattgtttatatttacacattcaaagtttagcatgttcatggggaatggttgtgttactattagtaagatataaatgtggaaaaaatagagaaacaattgaaaaattgctgtctaaactattatgtgtgtctccaatgtgtatgatgatagagcctccaaaattgcgtagtacagcagcagcattatattggtataaaacaggtatatcaaatattagtgaagtgtatggagacacgccagaatggatacaaagacaaacagtattacaacatagttttaatgattgtacatttgaattatcacagatggtacaatgggcctacgataatgacatagtagacgatagtgaaattgcatataaatatgcacaattggcagacactaatagtaatgcaagtgcctttctaaaaagtaattcacaggcaaaaattgtaaaggattgtgcaacaatgtgtagacattataaacgagcagaaaaaaaacaaatgagtatgagtcaatggataaaatatagatgtgatagggtagatgatggaggtgattggaagcaaattgttatgtttttaaggtatcaaggtgtagagtttatgtcatttttaactgcattaaaaagatttttgcaaggcatacctaaaaaaaattgcatattactatatggtgcagctaacacaggtaaatcattatttggtatgagtttaatgaaatttctgcaagggtctgtaatatgttttgtaaattctaaaagccatttttggttacaaccattagcagatgccaaaataggtatgttagatgatgctacagtgccctgttggaactacatagatgacaatttaagaaatgcattggatggaaatttagtttctatggatgtaaagcatagaccattggtacaactaaaatgccctccattattaattacatctaacattaatgctggtacagattctaggtggccttatttacataatagattggtggtgtttacatttcctaatgagtttccatttgacgaaaacggaaatccagtgtatgagcttaatgataagaactggaaatcctttttctcaaggacgtggtccagattaagtttgcacgaggacgaggacaaggaaaacgatggagactctttgccaacgtttaaatgtgtgtcaggacaaaatactaacacattatgaaaatgatagtacagacctacgtgaccatatagactattggaaacacatgcgcctagaatgtgctatttattacaaggccagagaaatgggatttaaacatattaaccaccaggtggtgccaacactggctgtatcaaagaataaagcattacaagcaattgaactgcaactaacgttagaaacaatatataactcacaatatagtaatgaaaagtggacattacaagacgttagccttgaagtgtatttaactgcaccaacaggatgtataaaaaaacatggatatacagtggaagtgcagtttgatggagacatatgcaatacaatgcattatacaaactggacacatatatatatttgtgaagaagcatcagtaactgtggtagagggtcaagttgactattatggtttatattatgttcatgaaggaatacgaacatattttgtgcagtttaaagatgatgcagaaaaatatagtaaaaataaagtatgggaagttcatgcgggtggtcaggtaatattatgtcctacatctgtgtttagcagcaacgaagtatcctctcctgaaattattaggcagcacttggccaaccaccccgccgcgacccataccaaagccgtcgccttgggcaccgaagaaacacagacgactatccagcgaccaagatcagagccagacaccggaaacccctgccacaccactaagttgttgcacagagactcagtggacagtgctccaatcctcactgcatttaacagctcacacaaaggacggattaactgtaatagtaacactacacccatagtacatttaaaaggtgatgctaatactttaaaatgtttaagatatagatttaaaaagcattgtacattgtatactgcagtgtcgtctacatggcattggacaggacataatgtaaaacataaaagtgcaattgttacacttacatatgatagtgaatggcaacgtgaccaatttttgtctcaagttaaaataccaaaaactattacagtgtctactggatttatgtctatatgacaaatcttgatactgcatccacaacattactggcgtgctttttgctttgcttttgtgtgcttttgtgtgtctgcctattaatacgtccgctgcttttgtctgtgtctacatacacatcattaataatattggtattactattgtggataacagcagcctctgcgtttaggtgttttattgtatatattatatttgtttatataccattatttttaatacatacacatgcacgctttttaattacataatgtatatgtacataatgtaattgttacatataattgttgtataccataacttactattttttcttttttattttcatatataatttttttttttgtttgtttgtttgttttttaataaactgttattacttaacaatgcgacacaaacgttctgcaaaacgcacaaaacgtgcatcggctacccaactttataaaacatgcaaacaggcaggtacatgtccacctgacattatacctaaggttgaaggcaaaactattgctgatcaaatattacaatatggaagtatgggtgtattttttggtgggttaggaattggaacagggtcgggtacaggcggacgcactgggtatattccattgggaacaaggcctcccacagctacagatacacttgctcctgtaagaccccctttaacagtagatcctgtgggcccttctgatccttctatagtttctttagtggaagaaactagttttattgatgctggtgcaccaacatctgtaccttccattcccccagatgtatcaggatttagtattactacttcaactgataccacacctgctatattagatattaataatactgttactactgttactacacataataatcccactttcactgacccatctgtattgcagcctccaacacctgcagaaactggagggcattttacactttcatcatccactattagtacacataattatgaagaaattcctatggatacatttattgttagcacaaaccctaacacagtaactagtagcacacccataccagggtctcgcccagtggcacgcctaggattatatagtcgcacaacacaacaggttaaagttgtagaccctgcttttgtaaccactcccactaaacttattacatatgataatcctgcatatgaaggtatagatgtggataatacattatatttttctagtaatgataatagtattaatatagctccagatcctgactttttggatatagttgctttacataggccagcattaacctctaggcgtactggcattaggtacagtagaattggtaataaacaaacactacgtactcgtagtggaaaatctataggtgctaaggtacattattattatgatttcagtactattgatcctgcagaagaaatagaattacaaactataacaccttctacatatactaccacttcacatgcagcctcacctacttctattaataatggattatatgatatttatgcagatgactttattacagatacttctacaaccccggtacaatctgtaccctctacatctttatcaggttatattcctgcaaatacaacaattccttttggtggtgcatacaatattcctttagtatcaggtcctgatatacccattaatataactgaccaagctccttcattaattcctatagttccagggtctccacaatatacaattattgctgatgcaggtgacttttatttacatcctagttattacatgttacgaaaacgacgtaaacgtttaccatattttttttcagatgtctctttggctgcctagtgaggccactgtctacttgcctcctgtcccagtatctaaggttgtaagcacggatgaatatgttgcacgcacaaacatatattatcatgcaggaacatccagactacttgcagttggacatccctattttcctattaaaaaacctaacaataacaaaatattagttcctaaagtatcaggattacaatacagggtatttagaatacatttacctgaccccaataagtttggttttcctgacacctcattttataatccagatacacagcggctggtttgggcctgtgtaggtgttgaggtaggtcgtggtcagccattaggtgtgggcattagtggccatcctttattaaataaattggatgacacagaaaatgctagtgcttatgcagcaaatgcaggtgtggataatagagaatgtatatctatggattacaaacaaacacaattgtgtttaattggttgcaaaccacctataggggaacactggggcaaaggatccccatgtaccaatgttgcagtaaatccaggtgattgtccaccattagagttaataaacacagttattcaggatggtgatatggttgatactggctttggtgctatggactttactacattacaggctaacaaaagtgaagttccactggatatttgtacatctatttgcaaatatccagattatattaaaatggtgtcagaaccatatggcgacagcttatttttttatttacgaagggaacaaatgtttgttagacatttatttaatagggctggtactgttggtgaaaatgtaccagacgatttatacattaaaggctctgggtctactgcaaatttagccagttcaaattattttcctacacctagtggttctatggttacctctgatgcccaaatattcaataaaccttattggttacaacgagcacagggccacaataatggcatttgttggggtaaccaactatttgttactgttgttgatactacacgcagtacaaatatgtcattatgtgctgccatatctacttcagaaactacatataaaaatactaactttaaggagtacctacgacatggggaggaatatgatttacagtttatttttcaactgtgcaaaataaccttaactgcagacgttatgacatacatacattctatgaattccactattttggaggactggaattttggtctacaacctcccccaggaggcacactagaagatacttataggtttgtaacatcccaggcaattgcttgtcaaaaacatacacctccagcacctaaagaagatccccttaaaaaatacactttttgggaagtaaatttaaaggaaaagttttctgcagacctagatcagtttcctttaggacgcaaatttttactacaagcaggattgaaggccaaaccaaaatttacattaggaaaacgaaaagctacacccaccacctcatctacctctacaactgctaaacgcaaaaaacgtaagctgtaagtattgtatgtatgttgaattagtgttgtttgttgtgtatatgtttgtatgtgcttgtatgtgcttgtaaatattacgttgtatgtgtgtttgtatgtatggtataataaacacgtgtgtatgtgtttttaaatgcttgtgtaactattgtgtcatgcaacataaataaacttattgtttcaacacctactaattgtgttgtggttattcattgtatataaactatatttgctacatcctgtttttgttttatatatactatattttgtagcgccagcggccattttgtagcttcaaccgaattcggttgcatgctttttggcacaaaatgtgtttttttaaatagttctatgtcagcaactatggtttaaacttgtacgtttcctgcttgccatgcgtgccaaatccctgttttcctgacctgcactgcttgccaaccattccattgttttttacactgcactatgtgcaactactgaatcactatgtacattgtgtcatataaaataaatcactatgcgccaacgccttacataccgctgttaggcacatatttttggcttgttttaactaacctaattgcatatttggcataaggtttaaacttctaaggccaactaaatgtcaccctagttcatacatgaactgtgtaaaggttagtcatacattgttcatttgtaaaactgcatatgggtgtgtgcaaaccgttttgggttacacatttacaagcaacttatataataatactaaactacaataattcatgtataaaactaagggcgtaaccgaaatcggttgaaccgaaaccggttagtataaaagcagacattttatgcaccaaaagagaactgcaatgtttcaggacccacaggagcgacccagaaagttaccacagttatgcacagagctgcaaacaactatacatgatataatattagaatgtgtgtactgcaagcaacagttactgcgacgtgaggtatatgactttgcttttcgggatttatgcatagtatatagagatgggaatccatatgctgtatgtgataaatgtttaaagttttattctaaaattagtgagtatagacattattgttatagtttgtatggaacaacattagaacagcaatacaacaaaccgttgtgtgatttgttaattaggtgtattaactgtcaaaagccactgtgtcctgaagaaaagcaaagacatctggacaaaaagcaaagattccataatataaggggtcggtggaccggtcgatgtatgtcttgttgcagatcatcaagaacacgtagagaaacccagctgtaatcatgcatggagatacacctacattgcatgaatatatgttagatttgcaaccagagacaactgatctctactgttatgagcaattaaatgacagctcagaggaggaggatgaaatagatggtccagctggacaagcagaaccggacagagcccattacaatattgtaaccttttgttgcaagtgtgactctacgcttcggttgtgcgtacaaagcacacacgtagacattcgtactttggaagacctgttaatgggcacactaggaattgtgtgccccatctgttctcagaaaccataatctacc

SEQ ID NO: 99 - DNA, 7906 bp, Homo sapiens
  source 1..7906: mol_type = genomic DNA; note = UNCseq2779
atggctgatcctgcaggtaccaatggggaagagggtacgggatgtaatggatggttttatgtagaggctgtagtggaaaaaaaaacaggggatgctatatcagatgacgagaacgaaaatgacagtgatacaggtgaagatttggtagattttatagtaaatgataatgattatttaacacaggcagaaacagagacagcacatgcgttgtttactgcacaggaagcaaaacaacatagagatgcagtacaggttctaaaacgaaagtatttgggtagtccacttagtgatattagtggatgtgtagacaataatattagtcctagattaaaagctatatgtatagaaaaacaaagtagagctgcaaaaaggagattatttgaaagcgaagacagcgggtatggcaatactgaagtggaaactcagcagatgttacaggtagaagggcgccatgagactgaaacaccatgtagtcagtatagtggtggaagtgggggtggttgcagtcagtacagtagtggaagtgggggagagggtgttagtgaaagacacactatatgccaaacaccacttacaaatattttaaatgtactaaaaactagtaatgcaaaggcagcaatgttagcaaaatttaaagagttatacggggtgagtttttcagaattagtaagaccatttaaaagtaataaatcaacgtgttgcgattggtgtattgctgcatttggacttacacccagtatagctgacagtataaaaacactattacaacaatattgtttatatttacacattcaaagtttagcatgttcatggggaatggttgtgttactattagtaagatataaatgtggaaaaaatagagaaacaattgaaaaattgctgtctaaactattatgtgtgtctccaatgtgtatgatgatagagcctccaaaattgcgtagtacagcagcagcattatattggtataaaacaggtatatcaaatattagtgaagtgtatggagacacgccagaatggatacaaagacaaacagtattacaacatagttttaatgattgtacatttgaattatcacagatggtacaatgggcctacgataatgacatagtagacgatagtgaaattgcatataaatatgcacaattggcagacactaatagtaatgcaagtgcctttctaaaaagtaattcacaggcaaaaattgtaaaggattgtgcaacaatgtgtagacattataaacgagcagaaaaaaaacaaatgagtatgagtcaatggataaaatatagatgtgatagggtagatgatggaggtgattggaagcaaattgttatgtttttaaggtatcaaggtgtagagtttatgtcatttttaactgcattaaaaagatttttgcaaggcatacctaaaaaaaattgcatattactatatggtgcagctaacacaggtaaatcattatttggtatgagtttaatgaaatttctgcaagggtctgtaatatgttttgtaaattctaaaagccatttttggttacaaccattagcagatgccaaaataggtatgttagatgatgctacagtgccctgttggaactacatagatgacaatttaagaaatgcattggatggaaatttagtttctatggatgtaaagcatagaccattggtacaactaaaatgccctccattattaattacatctaacattaatgctggtacagattctaggtggccttatttacataatagattggtggtgtttacatttcctaatgagtttccatttgacgaaaacggaaatccagtgtatgagcttaatgataagaactggaaatcctttttctcaaggacgtggtccagattaagtttgcacgaggacgaggacaaggaaaacgatggagactctttgccaacgtttaaatgtgtgtcaggacaaaatactaacacattatgaaaatgatagtacagacctacgtgaccatatagactattggaaacacatgcgcctagaatgtgctatttattacaaggccagagaaatgggatttaaacatattaaccaccaggtggtgccaacactggctgtatcaaagaataaagcattacaagcaattgaactgcaactaacgttagaaacaatatataactcacaatatagtaatgaaaagtggacattacaagacgttagccttgaagtgtatttaactgcaccaacaggatgtataaaaaaacatggatatacagtggaagtgcagtttgatggagacatatgcaatacaatgcattatacaaactggacacatatatatatttgtgaagaagcatcagtaactgtggtagagggtcaagttgactattatggtttatattatgttcatgaaggaatacgaacatattttgtgcagtttaaagatgatgcagaaaaatatagtaaaaataaagtatgggaagttcatgcgggtggtcaggtaatattatgtcctacatctgtgtttagcagcaacgaagtatcctctcctgaaattattaggcagcacttggccaaccaccccgccgcgacccataccaaagccgtcgccttgggcaccgaagaaacacagacgactatccagcgaccaagatcagagccagacaccggaaacccctgccacaccactaagttgttgcacagagactcagtggacagtgctccaatcctcactgcatttaacagctcacacaaaggacggattaactgtaatagtaacactacacccatagtacatttaaaaggtgatgctaatactttaaaatgtttaagatatagatttaaaaagcattgtacattgtatactgcagtgtcgtctacatggcattggacaggacataatgtaaaacataaaagtgcaattgttacacttacatatgatagtgaatggcaacgtgaccaatttttgtctcaagttaaaataccaaaaactattacagtgtctactggatttatgtctatatgacaaatcttgatacagcatccacaacattactggcgtgctttttgctttgcttttgtgtgcttttgtgtgtctgcctattaatacgtccgctgcttttgtctgtgtctacatacacatcattaataatattggtattactattgtggataacagcagcctctgcgtttaggtgttttattgtatatattatatttgtttatataccattatttttaatacatacacatgcacgctttttaattacataatgtatatgtacataatgtaattgttacatataattgttgtataccataacttactattttttgttttttattttcatatatattttttttttttgtttgtttgtttgttttttaataaactgttatcacttaacaatgcgacacaaacgttctgcaaaacgcacaaaacgtgcatcggctacccaactttataaaacatgcaaacaggcaggtacatgtccacctgacattatacctaaggttgaaggcaaaactattgctgatcaaatattacaatatggaagtatgggtgtattttttggtgggttaggaattggaacagggtcgggtacaggcggacgcactgggtatattccattgggaacaaggcctcccacagctacagatacacttgctcctgtaagaccccctttaacagtagatcctgtgggcccttctgatccttctatagtttctttagtggaagaaactagttttattgatgctggtgcaccaacatctgtaccttccattcccccagatgtatcaggatttagtattactacttcaactgataccacacctgctatattagatattaataatactgttactactgttactacacataataatcccactttcactgacccatctgtattgcagcctccaacacctgcagaaactggagggcattttacactttcatcatccactattagtacacataattatgaagaaattcctatggatacatttattgttagcacaaaccctaacacagtaactagtagcacacccataccagggtctcgcccagtggcacgcctaggattatatagtcgcacaacacaacaagttaaagttgtagaccctgcttttgtaaccactcccactaaacttattacatatgataatcctgcatatgaaggtatagatgtggataatacattatatttttctagtaatgataatagtattaatatagctccagatcctgactttttggatatagttgctttacataggccagcattaacctctaggcgtactggcattaggtacagtagaattggtaataaacaaacactacgtactcgtagtggaaaatctataggtgctaaggtacattattattatgatttcagtactattgatcctgcagaagaaatagaattacaaactataacaccttctacatatactaccacttcacatgcagcctcacctacttctattaataatggattatatgatatttatgcagatgactttattacagatacttctacaaccccggtaccatctgtaccctctacatctttatcaggttatattcctgcaaatacaacaattccttttggtggtgcatacaatattcctttagtatcaggtcctgatatacccattaatataactgaccaagctccttcattaattcctatagttccagggtctccacaatatacaattattgctgatgcaggtgacttttatttacatcctagttattacatgttacgaaaacgacgtaaacgtttaccatattttttttcagatgtctctttggctgcctagtgaggccactgtctacttgcctcctgtcccagtatctaaggttgtaagcacggatgaatatgttgcacgcacaaacatatattatcatgcaggaacatccagactacttgcagttggacatccctattttcctattaaaaaacctaacaataacaaaatattagttcctaaagtatcaggattacaatacagggtatttagaatacatttacctgaccccaataagtttggttttcctgacacctcattttataatccagatacacagcggctggtttgggcctgtgtaggtgttgaggtaggtcgtggtcagccattaggtgtgggcattagtggccatcctttattaaataaattggatgacacagaaaatgctagtgcttatgcagcaaatgcaggtgtggataatagagaatgtatatctatggattacaaacaaacacaattgtgtttaattggttgcaaaccacctataggggaacactggggcaaaggatccccatgtaccaatgttgcagtaaatccaggtgattgtccaccattagagttaataaacacagttattcaggatggtgatatggttgatactggctttggtgctatggactttactacattacaggctaacaaaagtgaagttccactggatatttgtacatctatttgcaaatatccagattatattaaaatggtgtcagaaccatatggcgacagcttatttttttatttacgaagggaacaaatgtttgttagacatttatttaatagggctggtactgttggtgaaaatgtaccagacgatttatacattaaaggctctgggtctactgcaaatttagccagttcaaattattttcctacacctagtggttctatggttacctctgatgcccaaatattcaataaaccttattggttacaacgagcacagggccacaataatggcatttgttggggtaaccaactatttgttactgttgttgatactacacgcagtacaaatatgtcattatgtgctgccatatctacttcagaaactacatataaaaatactaactttaaggagtacctacgacatggggaggaatatgatttacagtttatttttcaactgtgcaaaataaccttaactgcagacgttatgacatacatacattctatgaattccactattttggaggactggaattttggtctacaacctcccccaggaggcacactagaagatacttataggtttgtaacatcccaggcaattgcttgtcaaaaacatacacctccagcacctaaagaagatccccttaaaaaatacactttttgggaagtaaatttaaaggaaaagttttctgcagacctagatcagtttcctttgggacgcaaatttttactacaagcaggattgaaggccaaaccaaaatttacattaggaaaacgaaaagctacacccaccacctcatctacctctacaactgctaaacgcaaaaaacgtaagctgtaagtattgtatgtatgttgaattagtgttgtttgttgtgtatatgtttgtatgtgcttgtatgtgcttgtaaatattaagttgtatgtgtgtttgtatgtatggtataataaacacgtgtgtatgtgtttttaaatgcttgtgtaactattgtgtcatgcaacataaataaacttattgtttcaacacctactaattgtgttgtggttattcattgtatataaactatatttgctacatcctgtttttgttttatatatactatattttgtagcgccagcggccattttgtagcttcaaccgaattcggttgcatgctttttggcacaaaatgtgtttttttaaatagttctatgtcagcaactatggtttaaacttgtacgtttcctgcttgccatgcgtgccaaatccctgttttcctgacctgcactgcttgccaaccattccattgttttttacactgcactatgtgcaactactgaatcactatgtacattgtgtcatataaaataaatcactatgcgccaacgccttacataccgctgttaggcacatatttttggcttgttttaactaacctaattgcatatttggcataaggtttaaacttctaaggccaactaaatgtcaccctagttcatacatgaactgtgtaaaggttagtcatacattgttcatttgtaaaactgcacatgggtgtgtgcaaaccgttttgggttacacatttacaagcaacttatataataatactaaactacaataattcatgtataaaactaagggcgtaaccgaaatcggttgaaccgaaaccggttagtataaaagcagacattttatgcaccaaaggagaactgcaatgtttcaggacccacaggagcgacccagaaagttaccacagttatgcacagagctgcaaacaactatacatgatataatattagaatgtgtgtactgcaagcaacagttactgcgacgtgaggtatatgactttgcttttcgggatttatgcatagtatatagagatgggaatccatatgctgtatgtgataaatgtttaaagttttattctaaaattagtgagtatagacattattgttatagtttgtatggaacaacattagaacagcaatacaacaaaccgttgtgtgatttgttaattaggtgtattaactgtcaaaagccactgtgtcctgaagaaaagcaaagacatctggacaaaaagcaaagattccataatataaggggtcggtggaccggtcgatgtatgtcttgttgcagatcatcaagaacacgtagagaaacccagctgtaatcatgcatggagatacacctacattgcatgaatatatgttagatttgcaaccagagacaactgatctctactgttatgagcaattaaatgacagctcagaggaggaggatgaaatagatggtccagctggacaagcagaaccggacagagcccattacaatattgtaaccttttgttgcaagtgtgactctacgcttcggttgtgcgtacaaagcacacacgtagacattcgtactttggaagacctgttaatgggcacactaggaattgtgtgccccatctgttctcagaaaccataatctacc

SEQ ID NO: 100 - DNA, 7906 bp, Homo sapiens
  source 1..7906: mol_type = genomic DNA; note = UNCseq2783
atggctgatcctgcaggtaccaatggggaagagggtacgggatgtaatggatggttttatgtagaggctgtagtggaaaaaaaaacaggggatgctatatcagatgacgagaacgaaaatgacagtgatacaggtgaagatttggtagattttatagtaaatgataatgattatttaacacaggcagaaacagagacagcacatgcgttgtttactgcacaggaagcaaaacaacatagagatgcagtacaggttctaaaacgaaagtatttgggtagtccacttagtgatattagtggatgtgtagacaataatattagtcctagattaaaagctatatgtatagaaaaacaaagtagagctgcaaaaaggagattatttgaaagcgaagacagcgggtatggcaatactgaagtggaaactcagcagatgttacaggtagaagggcgccatgagactgaaacaccatgtagtcagtatagtggtggaagtgggggtggttgcagtcagtacagtagtggaagtgggggagagggtgttagtgaaagacacactatatgccaaacaccacttacaaatattttaaatgtactaaaaactagtaatgcaaaggcagcaatgttagcaaaatttaaagagttatacggggtgagttttacagaattagtaagaccatttaaaagtaataaatcaacgtgttgcgattggtgtattgctgcatttggacttacacccagtatagctgacagtataaaaacactattacaacaatattgtttatatttacacattcaaagtttagcatgttcatggggaatggttgtgttactattagtaagatataaatgtggaaaaaatagagaaacaattgaaaaattgctgtctaaactattatgtgtgtctccaatgtgtatgatgatagagcctccaaaattgcgtagtacagcagcagcattatattggtataaaacaggtatatcaaatattagtgaagtgtatggagacacgccagaatggatacaaagacaaacagtattacaacatagttttaatgattgtacatttgaattatcacagatggtacaatgggcctacgataatgacatagtagacgatagtgaaattgcatataaatatgcacaattggcagacactaatagtaatgcaagtgcctttctaaaaagtaattcacaggcaaaaattgtaaaggattgtgcaacaatgtgtagacattataaacgagcagaaaaaaaacaaatgagtatgagtcaatggataaaatatagatgtgatagggtagatgatggaggtgattggaagcaaattgttatgtttttaaggtatcaaggtgtagagtttatgtcatttttaactgcattaaaaagatttttgcaaggcatacctaaaaaaaattgcatattactatatggtgcagctaacacaggtaaatcattatttggtatgagtttaatgaaatttctgcaagggtctgtaatatgttttgtaaattctaaaagccatttttggttacaaccattagcagatgccaaaataggtatgttagatgatgctacagtgccctgttggaactatatagatgacaatttaagaaatgcattggatggaaatttagtttctatggatgtaaagcatagaccattggtacaactaaaatgccctccattattaattacatctaacattaatgctggtacagattctaggtggccttatttacataatagattggtggtgtttacatttcctaatgagtttccatttgacgaaaacggaaatccagtgtatgagcttaatgataagaactggaaatcctttttctcaaggacgtggtccagattaagtttgcacgaggacgaggacaaggaaaacgatggagactctttgccaacgtttaaatgtgtgtcaggacaaaatactaacacattatgaaaatgatagtacagacctacgtgaccatatagactattggaaacacatgcgcctagaatgtgctatttattacaaggccagagaaatgggatttaaacatattaaccaccaggtggtgccaacgctggctgtatcaaagaataaagcattacaagcaattgaactgcaactaacgttagaaacaatatataactcacaatatagtaatgaaaagtggacattacaagacgttagccttgaagtgtatttaactgcaccaacaggatgtataaaaaaacatggatatacagtggaagtgcagtttgatggagacatatgcaatacaatgcattatacaaactggacacatatatatatttgtgaagaagcatcagtaactgtggtagagggtcaagttgactattatggtttatattatgttcatgaaggaatacgaacatattttgtgcagtttaaagatgatgcagaaaaatatagtaaaaataaagtatgggaagttcatgcgggtggtcaggtaatattatgtcctacatctgtgtttagcagcaacgaagtatcctctcctgaaactattaggcagcacttggccaaccactccgccgcgacccataccaaagccgtcgccttgggcaccgaagaaacacagacgactatccagcgaccaagatcagagccagacaccggaaacccctgccacaccactaagttgttgcacagagactcagtggacagtgctccaatcctcactgcatttaacagctcacacaaaggacggattaactgtaatagtaacactacacccatagtacatttaaaaggtgatgctaatactttaaaatgtttaagatatagatttaaaaagcattgtaaattgtatactgcagtgtcgtctacatggcattggacaggacataatgtaaaacataaaagtgcaattgttacacttacatatgatagtgaatggcaacgtgaccaatttttgtctcaagttaaaataccaaaaactattacagtgtctactggatttatgtctatatgacaaatcttgatactgcatccacaacattactggcgtgctttttgctttgcttttgtgtgcttttgtgtgtctgcctattaatacgtccgctgcttttgtctgtgtctacatacacatcattaatactattggtattactattgtggataacagcagcctctgcgtttaggtgttttattgtatatattatatttgtttatataccattatttttaatacatacacatgcacgctttttaattacataatgtatatgtacataatgtaattgttacatataattgttgtataccataacttactattttttcttttttatttttatatataatttttttttttgtttgtttgtttgttttttaataaactgttatcacttaacaatgcgacacaaacgttctgcaaaacgcacaaaacgtgcatcggctacccaactttataaaacatgcaaacaggcaggtacatgtccacctgacattatacctaaggttgaaggcaaaactattgctgatcaaatattacaatatggaagtatgggtgtattttttggtgggttaggaattggaacagggtcgggtacaggcggacgcactgggtatattccattgggaacaaggcctcccacagctacagatacacttgctcctgtaagaccccctttaacagtagatcctgtgggcccttctgatccttctatagtttctttagtggaagaaactagttttattgatgctggtgcaccaacatctgtaccttccatccccccagatgtatcaggatttagtattactacttcaactgataccacacctgctatattagatattaataatactgttactactgttactacacataataatcccactttcactgacccatctgtattgcagcctccaacacctgcagaaactggagggcattttacactttcatcatccactattagtacacataattatgaagaaattcctatggatacatttattgttagcacaaaccctaacacagtaactagtagcacacccataccagggtctcgcccagtggcacgcctaggattatatagtcgcacaacacaacaagttaaagttgtagaccctgcttttgtaaccactcccactaaacttattacatatgataatcctgcatatgaaggtatagatgtggataatacattatattttcctagtaatgataatagtattaatatagctccagatcctgactttttggatatagttgctttacataggccagcattaacctctaggcgtactggcattaggtacagtagaattggtaataaacaaacactacgtactcgtagtggaaaatctataggtgctaaggtacattattattatgatttgagtactattgatcctgcagaagaaatagaattacaaactataacaccttctacatatactaccactttacatgcagcctcacctacttctattaataatggattatatgatatttatgcagatgactttattacagatacttctacaaccccggtaccatctgtaccctctacatctttatcaggttatattcctgcaaatacaacaattccttttggtggtgcatacaatattcctttagtatcaggtcctgatatacccattaatataactgaccaagctccttcattaattcctatagttccagggtctccacaatatacaattattgctgatgcaggtgacttttatttacatcctagttattacatgttacgaaaacgacgtaaacgtttaccatattttttttcagatgtctctttggctgcctagtgaggccactgtctacttgcctcctgtcccagtatctaaggttgtaagcacggatgaatatgttgcacgcacaaacatatattatcatgcaggaacatccagactacttgcagttggacatccctattttcctattaaaaaacctaacaataacaaaatattagttcctaaagtatcaggattacaatacagggtatttagaatacatttacctgaccccaataagtttggttttcctgacacctcattttataatccagatacacagcggctggtttgggcctgtgtaggtgttgaggtaggtcgtggtcagccattaggtgtgggcattagtggccatcctttattaaataaattggatgacacagaaaatgctagtgcttatgcagcaaatgcaggtgtggataatagagaatgtatatctatggattacaaacaaacacaattgtgtttaattggttgcaaaccacctataggggaacactggggcaaaggatccccatgtaccaatgttgcagtaaatccaggtgattgtccaccattagagttaataaacacagttattcaggatggtgatatggttgatactggctttggtgctatggactttactacattacaggctaacaaaagtgaagttccactggatatttgtacatctatttgcaaatatccagattatattaaaatggtgtcagaaccatatggcgacagcttatttttttatttacgaagggaacaaatgtttgttagacatttatttaatagggctggtgctgttggtgaaaatgtaccagacgatttatacattaaaggctctgggtctactgcaaatttagccagttcaaattattttcctacacctagtggttctatggttacctctgatgcccaaatattcaataaaccttattggttacaacgagcacagggccacaataatggcatttgttggggtaaccaactatttgttactgttgttgatactacacgcagtacaaatatgtcattatgtgctgccatatctacttcagaaactacatataaaaatactaactttaaggagtacctacgacatggggaggaatatgatttacagtttatttttcaactgtgcaaaataaccttaactgcagacgttatgacatacatacattctatgaattccactattttggaggactggaattttggtctacaaccccccccaggaggcacactagaagatacttataggtttgtaacatcccaggcaattgcttgtcaaaaacatacacctccagcacctaaagaagatccccttaaaaaatacactttttgggaagtaaatttaaaggaaaagttttctgcagacctagatcagtttcctttaggacgcaaatttttactacaagcaggattgaaggccaaaccaaaatttacattaggaaaacgaaaagctacacccaccacctcatctacctctacaactgctaaacgcaaaaaacgtaagctgtaagtattgtatgtatgttgaattagtgttgtttgttgtttatatgtttgtatgtgcttgtatgtgcttgtaaatattaagttgtatgtgtgtttgtatgtatggtataataaacacgtgtgtatgtgtttttaaatgcttgtgtaactattgtgtgatgcaacataaataaacttattgtttcaacacctactaattgtgttgtggttattcattgtatataaactatatttgctacatcctgtttttgttttatatatactatattttgtagcgccagcggccattttgtagcttcaaccgaattcggttgcatgctttttggcacaaaatgtgtttttttaaatagttctatgtcagcaactatagtttaaacttgtacgtttcctgcttgccatgcgtgccaaatccctgttttcctgacctgcactgcttgccaaccattccattgttttttacactgcactatgtgcaactactgaatcactatgtacattgtgtcatataaaataaatcactatgcgccaacgccttacataccgctgttaggcacatatttttggcttgttttaactaacctaattgcatatttggcataaggtttaaacttctaaggccaactaaatgtcaccctagttcatacatgaactgtgtaaaggttagtcatacattgttcatttgtaaaactgcacatgggtgtgtgcaaaccgttttgggttacacatttacaagcaacttatataataatactaaactacaataatccatgtataaaactaagggcgtaaccgaaatcggttgaaccgaaaccggttagtataaaagcagacattttatgcaccaaaagagaactgcaatgtttcaggacccacaggagcgacccggaaagttaccacagttatgcacagagctgcaaacaactatacatgatataatattagaatgtgtgtactgcaagcaacagttactgcgacgtgaggtatatgactttgcttttcgggatttatgcatagtatatagagatgggaatccatatgctgtatgtgataaatgtttaaagttttattctaaaattagtgagtatagacattattgttatagtgtgtatggaacaacattagaacagcaatacaacaaaccgttgtgtgatttgttaattaggtgtattaactgtcaaaagccactgtgtcctgaagaaaagcaaagacatctggacaaaaagcaaagattccataatataaggggtcggtggaccggtcgatgtatgtcttgttgcagatcatcaagaacacgtagagaaacccagctgtaatcatgcatggagatacacctacattgcatgaatatatgttagatttgcaaccagagacaactgatctctactgttatgagcaattaaatgacagctcagaggaggaggatgaaatagatggtccagctggacaagcagaaccggacagagcccattacaatattgtaaccttttgttgcaagtgtgactctacgcttcggttgtgcgtacaaagcacacacgtagacattcgtactttggaagacctgttaatgggcacactaggaattgtgtgccccatctgttctcagaaaccataatctacc

SEQ ID NO: 101 - DNA, 7906 bp, Homo sapiens
  source 1..7906: mol_type = genomic DNA; note = UNCseq2786
atggctgatcctgcaggtaccaatggggaagagggtacgggatgtaatggatggttttatgtagaggctgtagtggaaaaaaaaacaggggatgctatatcagatgacgagaacgaaaatgacagtgatacaggtgaagatttggtagattttatagtaaatgataatgattatttaacacaggcagaaacagagacagcacatgcgttgtttactgcacaggaagcaaaacaacatagagatgcagtacaggttctaaaacgaaagtatttgggtagtccacttagtgatattagtggatgtgtagacaataatattagtcctagattaaaagctatatgtatagaaaaacaaagtagagctgcaaaaaggagattatttgaaagcgaagacagcgggtatggcaatactgaagtggaaactcagcagatgttacaggtagaagggcgccatgagactgaaacaccatgtagtcagtatagtggtggaagtgggggtggttgcagtcagtacagtagtggaagtgggggagagggtgttagtgaaagacacactatatgccaaacaccacttacaaatattttaaatgtactaaaaactagtaatgcaaaggcagcaatgttagcaaaatttaaagagttatacggggtgagttttacagaattagtaagaccatttaaaagtaataaatcaacgtgttgcgattggtgtattgctgcatttggacttacacccagtatagctgacagtataaaaacactattacaacaatattgtttatatttacacattcaaagtttagcatgttcatggggaatggttgtgttactattagtaagatataaatgtggaaaaaatagagaaacaattgaaaaattgctgtctaaactattatgtgtgtctccaatgtgtatgatgatagagcctccaaaattgcgtagtacagcagcagcattatattggtataaaacaggtatatcaaatattagtgaagtgtatggagacacgccagaatggatacaaagacaaacagtattacaacatagttttaatgattgtacatttgaattatcacagatggtacaatgggcctacgataatgacatagtagacgatagtgaaattgcatataaatatgcacaattggcagacactaatagtaatgcaagtgcctttctaaaaagtaattcacaggcaaaaattgtaaaggattgtgcaacaatgtgtagacattataaacgagcagaaaaaaaacaaatgagtatgagtcaatggataaaatatagatgtgatagggtagatgatggaggtgattggaagcaaattgttatgtttttaaggtatcaaggtgtagagtttatgtcatttttaactgcattaaaaagatttttgcaaggcatacctaaaaaaaattgcatattactatatggtgcagctaacacaggtaaatcattatttggtatgagtttaatgaaatttctgcaagggtctgtaatatgttttgtaaattctaaaagccatttttggttacaaccattagcagatgccaaaataggtatgttagatgatgctacagtgccctgttggaactatatagatgacaatttaagaaatgcattggatggaaatttagtttctatggatgtaaagcatagaccattggtacaactaaaatgccctccattattaattacatctaacattaatgctggtacagattctaggtggccttatttacataatagattggtggtgtttacatttcctaatgagtttccatttgacgaaaacggaaatccagtgtatgagcttaatgataagaactggaaatcctttttctcaaggacgtggtccagattaagtttgcacgaggacgaggacaaggaaaacgatggagactctttgccaacgtttaaatgtgtgtcaggacaaaatactaacacattatgaaaatgatagtacagacctacgtgaccatatagactattggaaacacatgcgcctagaatgtgctatttattacaaggccagagaaatgggatttaaacatattaaccaccaggtggtgccaacgctggctgtatcaaagaataaagcattacaagcaattgaactgcaactaacgttagaaacaatatataactcacaatatagtaatgaaaagtggacattacaagacgttagccttgaagtgtatttaactgcaccaacaggatgtataaaaaaacatggatatacagtggaagtgcagtttgatggagacatatgcaatacaatgcattatacaaactggacacatatatatatttgtgaagaagcatcagtaactgtggtagagggtcaagttgactattatggtttatattatgttcatgaaggaatacgaacatattttgtgcagtttaaagatgatgcagaaaaatatagtaaaaataaagtatgggaagttcatgcgggtggtcaggtaatattatgtcctacatctgtgtttagcagcaacgaagtatcctctcctgaaactattaggcagcacttggccaaccactccgccgcgacccataccaaagccgtcgccttgggcaccgaagaaacacagacgactatccagcgaccaagatcagagccagacaccggaaacccctgccacaccactaagttgttgcacagagactcagtggacagtgctccaatcctcactgcatttaacagctcacacaaaggacggattaactgtaatagtaacactacacccatagtacatttaaaaggtgatgctaatactttaaaatgtttaagatatagatttaaaaagcattgtaaattgtatactgcagtgtcgtctacatggcattggacaggacataatgtaaaacataaaagtgcaattgttacacttacatatgatagtgaatggcaacgtgaccaatttttgtctcaagttaaaataccaaaaactattacagtgtctactggatttatgtctatatgacaaatcttgatactgcatccacaacattactggcgtgctttttgctttgcttttgtgtgcttttgtgtgtctgcctattaatacgtccgctgcttttgtctgtgtctacatacacatcattaatactattggtattactattgtggataacagcagcctctgcgtttaggtgttttattgtatatattgtatttgtttatataccattatttttaatacatacacatgcacgctttttaattacataatgtatatgtacataatgtaattgttacatataattgttgtataccataacttactattttttcttttttatttttatatataattttttttttggtttgtttgtttgttttttaataaactgttatcacttaacaatgcgacacaaacgttctgcaaaacgcacaaaacgtgcatcggctacccaactttataaaacatgcaaacaggcaggtacatgtccacctgacattatacctaaggttgaaggcaaaactattgctgatcaaatattacaatatggaagtatgggtgtattttttggtgggttaggaattggaacagggtcgggtacaggcggacgcactgggtatattccattgggaacaaggcctcccacagctacagatacacttgctcctgtaagaccccctttaacagtagatcctgtgggcccttctgatccttctatagtttctttagtggaagaaactagttttattgatgctggtgcaccaacatctgtaccttccatccccccagatgtatcaggatttagtattactacttcaactgataccacacctgctatattggatattaataatactgttactactgttactacacataataatcccactttcactgacccatctgtattgcagcctccaacacctgcagaaactggagggcattttacactttcatcatccactattagtacacataattatgaagaaattcctatggatacatttattgttagcacaaaccctaacacagtaactagtagcacacccataccagggtctcgcccagtggcacgcctaggattatatagtcgcacaacacaacaagttaaagttgtagaccctgcttttgtaaccactcccactaaacttattacatatgataatcctgcatatgaaggtatagatgtggataatacattatattttcctagtaatgataatagtattaatatagctccagatcctgactttttggatatagttgctttacataggccagcattaacctctaggcgtactggcattaggtacagtagaattggtaataaacaaacactacgtactcgtagtggaaaatctataggtgctaaggtacattattattatgatttgagtactattgatcctgcagaagaaatagaattacaaactataacaccttctacatatactaccacttcacatgcagcctcacctacttctattaataatggattatatgatatttatgcagatgactttattacagatacttctacaaccccggtaccatctgtaccctctacatctttatcaggttatattcctgcaaatacaacaattccttttggtggtgcatacaatattcctttagtatcaggtcctgatatacccattaatataactgaccaagctccttcattaattcctatagttccagggtctccacaatatacaattattgctgatgcaggtgacttttatttacatcctagttattacatgttacgaaaacgacgtaaacgtttaccatattttttttcagatgtctctttggctgcctagtgaggccactgtctacttgcctcctgtcccagtatctaaggttgtaagcacggatgaatatgttgcacgcacaaacatatattatcatgcaggaacatccagactacttgcagttggacatccctattttcctattaaaaaacctaacaataacaaaatattagttcctaaagtatcaggattacaatacagggtatttagaatacatttacctgaccccaataagtttggttttcctgacacctcattttataatccagatacacagcggctggtttgggcctgtgtaggtgttgaggtaggtcgtggtcagccattaggtgtgggcattagtggccatcctttattaaataaattggatgacacagaaaatgctagtgcttatgcagcaaatgcaggtgtggataatagagaatgtatatctatggattacaaacaaacacaattgtgtttaattggttgcaaaccacctataggggaacactggggcaaaggatccccatgtaccaatgttgcagtaaatccaggtgattgtccaccattagagttaataaacacagttattcaggatggtgatatggttgatactggctttggtgctatggactttactacattacaggctaacaaaagtgaagttccactggatatttgtacatctatttgcaaatatccagattatattaaaatggtgtcagaaccatatggcgacagcttatttttttatttacgaagggaacaaatgtttgttagacatttatttaatagggctggtgctgttggtgaaaatgtaccagacgatttatacattaaaggctctgggtctactgcaaatttagccagttcaaattattttcctacacctagtggttctatggttacctctgatgcccaaatattcaataaaccttattggttacaacgagcacagggccacaataatggcatttgttggggtaaccaactatttgttactgttgttgatactacacgcagtacaaatatgtcattatgtgctgccatatctacttcagaaactacatataaaaatactaactttaaggagtacctacgacatggggaggaatatgatttacagtttatttttcaactgtgcaaaataaccttaactgcagacgttatgacatacatacattctatgaattccactattttggaggactggaattttggtctacaaccccccccaggaggcacactagaagatacttataggtttgtaacatcccaggcaattgcttgtcaaaaacatacacctccagcacctaaagaagatccccttaaaaaatacactttttgggaagtaaatttaaaggaaaagttttctgcagacctagatcagtttcctttaggacgcaaatttttactacaagcaggattgaaggccaaaccaaaatttacattaggaaaacgaaaagctacacccaccacctcatctacctctacaactgctaaacgcaaaaaacgtaagctgtaagtattgtatgtatgttgaattagtgttgtttgttgtttatatgtttgtatgtgcttgtatgtgcttgtaaatattaagttgtatgtgtgtttgtatgtatggtataataaacacgtgtgtatgtgtttttaaatgcttgtgtaactattgtgtgatgcaacataaataaacttattgtttcaacacctactaattgtgttgtggttattcattgtatataaactatatttgctacatcctgtttttgttttatatatactatattttgtagcgccagcggccattttgtagcttcaaccgaattcggttgcatgctttttggcacaaaatgtgtttttttaaatagttctatgtcagcaactatagtttaaacttgtacgtttcctgcttgccatgcgtgccaaatccctgttttcctgacctgcactgcttgccaaccattccattgttttttacactgcactatgtgcaactactgaatcactatgtacattgtgtcatataaaataaatcactatgcgccaacgccttacataccgctgttaggcacatatttttggcttgttttaactaacctaattgcatatttggcataaggtttaaacttctaaggccaactaaatgtcaccctagttcatacatgaactgtgtaaaggttagtcatacattgttcatttgtaaaactgcacatgggtgtgtgcaaaccgttttgggttacacatttacaagcaacttatataataatactaaactacaataatccatgtataaaactaagggcgtaaccgaaatcggttgcaccgaaaccggttagtataaaagcagacattttatgcaccaaaagagaactgcaatgtttcaggacccacaggagcgacccggaaagttaccacagttatgcacagagctgcaaacaactatacatgatataatattagaatgtgtgtactgcaagcaacagttactgcgacgtgaggtatatgactttgcttttcgggatttatgcatagtatatagagatgggaatccatatgctgtatgtgataaatgtttaaagttttattctaaaattagtgagtatagacattattgttatagtgtgtatggaacaacattagaacagcaatacaacaaaccgttgtgtgatttgttaattaggtgtattaactgtcaaaagccactgtgtcctgaagaaaagcaaagacatctggacaaaaagcaaagattccataatataaggggtcggtggaccggtcgatgtatgtcttgttgcagatcatcaagaacacgtagagaaacccagctgtaatcatgcatggagatacacctacattgcatgaatatatgttagatttgcaaccagagacaactgatctctactgttatgagcaattaaatgacagctcagaggaggaggatgaaatagatggtccagctggacaagcagaaccggacagagcccattacaatattgtaaccttttgttgcaagtgtgactctacgcttcggttgtgcgtacaaagcacacacgtagacattcgtactttggaagacctgttaatgggcacactaggaattgtgtgccccatctgttctcagaaaccataatctacc

SEQ ID NO: 102 - DNA, 7906 bp, Homo sapiens
  source 1..7906: mol_type = genomic DNA; note = UNCseq2789
atggctgatcctgcaggtaccaatggggaagagggtacgggatgtaatggatggttttatgtagaggctgtagtggaaaaaaaaacaggggatgctatatcagatgacgagaacgaaaatgacagtgatacaggtgaagatttggtagattttatagtaaatgataatgattatttaacacaggcagaaacagagacagcacatgcgttgtttactgcacaggaagcaaaacaacatagagatgcagtacaggttctaaaacgaaagtatttgggtagtccacttagtgatattagtggatgtgtagacaataatattagtcctagattaaaagctatatgtatagaaaaacaaagtagagctgcaaaaaggagattatttgaaagcgaagacagcgggtatggcaatactgaagtggaaactcagcagatgttacaggtagaagggcgccatgagactgaaacaccatgtagtcagtatagtggtggaagtgggggtggttgcagtcagtacagtagtggaagtgggggagagggtgttagtgaaagacacactatatgccaaacaccacttacaaatattttaaatgtactaaaaactagtaatgcaaaggcagcaatgttagcaaaatttaaagagttatacggggtgagttttacagaattagtaagaccatttaaaagtaataaatcaacgtgttgcgattggtgtattgctgcatttggacttacacccagtatagctgacagtataaaaacactattacaacaatattgtttatatttacacattcaaagtttagcatgttcatggggaatggttgtgttactattagtaagatataaatgtggaaaaaatagagaaacaattgaaaaattgctgtctaaactattatgtgtgtctccaatgtgtatgatgatagagcctccaaaattgcgtagtacagcagcagcattatattggtataaaacaggtatatcaaatattagtgaagtgtatggagacacgccagaatggatacaaagacaaacagtattacaacatagttttaatgattgtacatttgaattatcacagatggtacaatgggcctacgataatgacatagtagacgatagtgaaattgcatataaatatgcacaattggcagacactaatagtaatgcaagtgcctttctaaaaagtaattcacaggcaaaaattgtaaaggattgtgcaacaatgtgtagacattataaacgagcagaaaaaaaacaaatgagtatgagtcaatggataaaatatagatgtgatagggtagatgatggaggtgattggaagcaaattgttatgtttttaaggtatcaaggtgtagagtttatgtcatttttaactgcattaaaaagatttttgcaaggcatacctaaaaaaaattgcatattactatatggtgcagctaacacaggtaaatcattatttggtatgagtttaatgaaatttctgcaagggtctgtaatatgttttgtaaattctaaaagccatttttggttacaaccattagcagatgccaaaataggtatgttagatgatgctacagtgccctgttggaactacatagatgacaatttaagaaatgcattggatggaaatttagtttctatggatgtaaagcatagaccattggtacaactaaaatgccctccattattaattacatctaacattaatgctggtacagattctaggtggccttatttacataatagattggtggtgtttacatttcctaatgagtttccatttgacgaaaacggaaatccagtgtatgagcttaatgataagaactggaaatcctttttctcaaggacgtggtccagattaagtttgcacgaggacgaggacaaggaaaacgatggagactctttgccaacgtttaaatgtgtgtcaggacaaaatactaacacattatgaaaatgatagtacagacctacgtgaccatatagactattggaaacacatgcgcctagaatgtgctatttattacaaggccagagaaatgggatttaaacatattaaccaccaggtggtgccaacgctggctgtatcaaagaataaagcattacaagcaattgaactgcaactaacgttagaaacaatatataactcacaatatagtaatgaaaagtggacattacaagacgttagccttgaagtgtatttaactgcaccaacaggatgtataaaaaaacatggatatacagtggaagtgcagtttgatggagacatatgcaatacaatgcattatacaaactggacacatatatatatttgtgaagaagcatcagtaactgtggtagagggtcaagttgactattatggtttatattatgttcatgaaggaatacgaacatattttgtgcagtttaaagatgatgcagaaaaatatagtaaaaataaagtatgggaagttcatgcgggtggtcaggtaatattatgtcctacatctgtgtttagcagcaacgaagtatcctctcctgaaactattaggcagcacttggccaaccactccgccgcgacccataccaaagccgtcgccttgggcaccgaagaaacacagacgactatccagcgaccaagatcagagccagacaccggaaacccctgccacaccactaagttgttgcacagagactcagtggacagtgctccaatcctcactgcatttaacagctcacacaaaggacggattaactgtaatagtaacactacacccatagtacatttaaaaggtgatgctaatactttaaaatgtttaagatatagatttaaaaagcattgtacattgtatactgcagtgtcgtctacatggcattggacaggacataatgtaaaacataaaagtgcaattgttacacttacatatgatagtgaatggcaacgtgaccaatttttgtctcaagttaaaataccaaaaactattacagtgtctactggatttatgtctatatgacaaatcttgatactgcatccacaacattactggcgtgctttttgctttgcttttgtgtgcttttgtgtgtctgcctattaatacgtccgctgcttttgtctgtgtctacatacacatcattaatactattggtattactattgtggataacagcagcctctgcgtttaggtgttttattgtatatattgtatttgtttatataccattatttttaatacatacacatgcacgctttttaattacataatgtatatgtacataatgtaattgttacatataattgttgtataccataacttactattttttcttttttattttcatatataatttttttttttgtttgtttgtttgttttttaataaactgttattacttaacaatgcgacacaaacgttctgcaaaacgcacaaaacgtgcatcggctacccaactttataaaacatgcaaacaggcaggtacatgtccacctgacattatacctaaggttgaaggcaaaactattgctgatcaaatattacaatatggaagtatgggtgtattttttggtgggttaggaattggaacagggtcgggtacaggcggacgcactgggtatattccattgggaacaaggcctcccacagctacagatacacttgctcctgtaagaccccctttaacagtagatcctgtgggcccttctgatccttctatagtttctttagtggaagaaactagttttattgatgctggtgcaccaacatctgtaccttccattcccccagatgtatcaggatttagtattactacttcaactgataccacacctgctatattagatattaataatactgttactactgttactacacataataatcccactttcactgacccatctgtattgcagcctccaacacctgcagaaactggagggcattttacactttcatcatccactattagtacacataattatgaagaaattcctatggatacatttattgttagcacaaaccctaacacagtaactagtagcacacccataccagggtctcgcccagtggcacgcctaggattatatagtcgcacaacacaacaagttaaagttgtagaccctgcttttgtaaccactcccactaaacttattacatatgataatcctgcatatgaaggtatagatgtggataatacattatatttttctagtaatgataatagtattaatatagctccagatcctgactttttggatatagttgctttacataggccagcattaacctctaggcgtactggcattaggtacagtagaattggtaataaacaaacactacgtactcgtagtggaaaatctataggtgctaaggtacattattattatgatttgagtactattgatcctgcagaagaaatagaattacaaactataacaccttctacatatactaccacttcacatgcagcctcacctacttctattaataatggattatatgatatttatgcagatgactttattacagatacttctacaaccccggtaccatctgtaccctctacatctttatcaggttatattcctgcaaatacaacaattccttttggtggtgcatacaatattcctttagtatcaggtcctgatatacccattaatataactgaccaagctccttcattaattcctatagttccagggtctccacaatatacaattattgctgatgcaggtgacttttatttacatcctagttattacatgttacgaaaacgacgtaaacgtttaccatattttttttcagatgtctctttggctgcctagtgaggccactgtctacttgcctcctgtcccagtatctaaggttgtaagcacggatgaatatgttgcacgcacaaacatatattatcatgcaggaacatccagactacttgcagttggacatccctattttcctattaaaaaacctaacaataacaaaatattagttcctaaagtatcaggattacaatacagggtatttagaatacatttacctgaccccaataagtttggttttcctgacacctcattttataatccagatacacagcggctggtttgggcctgtgtaggtgttgaggtaggtcgtggtcagccattaggtgtgggcattagtggccatcctttattaaataaattggatgacacagaaaatgctagtgcttatgcagcaaatgcaggtgtggataatagagaatgtatatctatggattacaaacaaacacaattgtgtttaattggttgcaaaccacctataggggaacactggggcaaaggatccccatgtaccaatgttgcagtaaatccaggtgattgtccaccattagagttaataaacacagttattcaggatggtgatatggttgatactggctttggtgctatggactttactacattacaggctaacaaaagtgaagttccactggatatttgtacatctatttgcaaatatccagattatattaaaatggtgtcagaaccatatggcgacagcttatttttttatttacgaagggaacaaatgtttgttagacatttatttaatagggctggtgctgttggtgaaaatgtaccagacgatttatacattaaaggctctgggtctactgcaaatttagccagttcaaattattttcctacacctagtggttctatggttacctctgatgcccaaatattcaataaaccttattggttacaacgagcacagggccacaataatggcatttgttggggtaaccaactatttgttactgttgttgatactacacgcagtacaaatatgtcattatgtgctgccatatctacttcagaaactacatataaaaatactaactttaaggagtacctacgacatggggaggaatatgatttacagtttatttttcaactgtgcaaaataaccttaactgcagacgttatgacatacatacattctatgaattccactattttggaggactggaattttggtctacaacctcccccaggaggcacactagaagatacttataggtttgtaacatcccaggcaattgcttgtcaaaaacatacacctccagcacctaaagaagatccccttaaaaaatacactttttgggaagtaaatttaaaggaaaagttttctgcagacctagatcagtttcctttaggacgcaaatttttactacaagcaggattgaaggccaaaccaaaatttacattaggaaaacgaaaagctacacccaccacctcatctacctctacaactgctaaacgcaaaaaacgtaagctgtaagtattgtatgtatgttgaattagtgttgtttgttgtttatatgtttgtatgtgcttgtatgtgcttgtaaatattacgttgtatgtgtgtttgtatgtatggtataataaacacgtgtgtatgtgtttttaaatgcttgtgtaactattgtgtgatgcaacataaataaacttattgtttcaacacctactaattgtgttgtgggtattcattgtatataaactatatttgctacatcctgtttttgttttatatatactatattttgtagcgccagcggccattttgtagcttcaaccgaattcggttgcatgctttttggcacaaaatgtgtttttttaaatagttctatgtcagcaactatggtttaaacttgtacgtttcctgcttgccatgcgtgccaaatccctgttttcctgacctgcactgcttgccaaccattccattgttttttacactgcactatgtgcaactactgaatcactatgtacattgtgtcatataaaataaatcactatgcgccaacgccttacataccgctgttaggcacatagttttggcttgttttaactaacctaattgcatatttggcataaggtttaaacttctaaggccaactaaatgtcaccctagttcatacatgaactgtgtaaaggttagtcatacattgttcatttgtaaaactgcacatgggtgtgtgcaaaccgttttgggttacatatttacaagcaacttatataataatactaaactacaataattcatgtataaaactaagggcgtaaccgaaatcggttgaaccgaaaccggttagtataaaagcagacattttatgcaccaaaagagaactgcaatgtttcaggacccacaggagcgacccagaaagttaccacagttatgcacagagctgcaaacaactatacatgatataatattagaatgtgtgtactgcaagcaacagttactgcgacgtgaggtatatgactttgcttttcgggatttatgcatagtatatagagatgggaatccatatgctgtatgtgataaatgtttaaagttttattctaaaattagtgagtatagacattattgttatagtttgtatggaacaacattagaacagcaatacaacaaaccgttgtgtgatttgttaattaggtgtattaactgtcaaaagccactgtgtcctgaagaaaagcaaagacatctggacaaaaagcaaagattccataatataaggggtcggtggaccggtcgatgtatgtcttgttgcagatcatcaagaacacgtagagaaacccagctgtaatcatgcatggagatacacctacattgcatgaatatatgttagatttgcaaccagagacaactgatctctactgttatgagcaattaaatgacagctcagaggaggaggatgaaatagatggtccagctggacaagcagaaccggacagagcccattacaatattgtaaccttttgttgcaagtgtgactctacgcttcggttgtgcgtacaaagcacacacgtagacattcgtactttggaagacctgttaatgggcacactaggaattgtgtgccccatctgttctcagaaaccataatctacc

SEQ ID NO: 103 - DNA, 7906 bp, Homo sapiens
  source 1..7906: mol_type = genomic DNA; note = UNCseq2790
atggctgatcctgcaggtaccaatggggaagagggtacgggatgtaatggatggttttatgtagaggctgtagtggaaaaaaaaacaggggatgctatatcagatgacgagaacgaaaatgacagtgatacaggtgaagatttggtagattttatagtaaatgataatgattatttaacacaggcagaaacagagacagcacatgcgttgtttactgcacaggaagcaaaacaacatagagatgcagtacaggttctaaaacgaaagtatttgggtagtccacttagtgatattagtggatgtgtagacaataatattagtcctagattaaaagctatatgtatagaaaaacaaagtagagctgcaaaaaggagattatttgaaagcgaagacagcgggtatggcaatactgaagtggaaactcagcagatgttacaggtagaagggcgccatgagactgaaacaccatgtagtcagtatagtggtggaagtgggggtggttgcagtcagtacagtagtggaagtgggggagagggtgttagtgaaagacacactatatgccaaacaccacttacaaatattttaaatgtactaaaaactagtaatgcaaaggcagcaatgttagcaaaatttaaagagttatacggggtgagtttttcagaattagtaagaccatttaaaagtaataaatcaacgtgttgcgattggtgtattgctgcatttggacttacacccagtatagctgacagtataaaaacactattacaacaatattgtttatatttacacattcaaagtttagcatgttcatggggaatggttgtgttactattagtaagatataaatgtggaaaaaatagagaaacaattgaaaaattgctgtctaaactattatgtgtgtctccaatgtgtatgatgatagagcctccaaaattgcgtagtacagcagcagcattatattggtataaaacaggtatatcaaatattagtgaagtgtatggagacacgccagaatggatacaaagacaaacagtattacaacatagttttaatgattgtacatttgaattatcacagatggtacaatgggcctacgataatgacatagtagacgatagtgaaattgcatataaatatgcacaattggcagacactaatagtaatgcaagtgcctttctaaaaagtaattcacaggcaaaaattgtaaaggattgtgcaacaatgtgtagacattataaacgagcagaaaaaaaacaaatgagtatgagtcaatggataaaatatagatgtgatagggtagatgatggaggtgattggaagcaaattgttatgtttttaaggtatcaaggtgtagagtttatgtcatttttaactgcattaaaaagatttttgcaaggcatacctaaaaaaaattgcatattactatatggtgcagctaacacaggtaaatcattatttggtatgagtttaatgaaatttctgcaagggtctgtaatatgttttgtaaattctaaaagccatttttggttacaaccattagcagatgccaaaataggtatgttagatgatgctacagtgccctgttggaactacatagatgacaatttaagaaatgcattggatggaaatttagtttctatggatgtaaagcatagaccattggtacaactaaaatgccctccattattaattacatctaacattaatgctggtacagattctaggtggccttatttacataatagattggtggtgtttacatttcctaatgagtttccatttgacgaaaacggaaatccagtgtatgagcttaatgataagaactggaaatcctttttctcaaggacgtggtccagattaagtttgcacgaggacgaggacaaggaaaacgatggagactctttgccaacgtttaaatgtgtgtcaggacaaaatactaacacattatgaaaatgatagtacagacctacgtgaccatatagactattggaaacacatgcgcctagaatgtgctatttattacaaggccagagaaatgggatttaaacatattaaccaccaggtggtgccaacactggctgtatcaaagaataaagcattacaagcaattgaactgcaactaacgttagaaacaatatataactcacaatatagtaatgaaaagtggacattacaagacgttagccttgaagtgtatttaactgcaccaacaggatgtataaaaaaacatggatatacagtggaagtgcagtttgatggagacatatgcaatacaatgcattatacaaactggacacatatatatatttgtgaagaagcatcagtaactgtggtagagggtcaagttgactattatggtttatattatgttcatgaaggaatacgaacatattttgtgcagtttaaagatgatgcagaaaaatatagtaaaaataaagtatgggaagttcatgcgggtggtcaggtaatattatgtcctacatctgtgtttagcagcaacgaagtatcctctcctgaaattattaggcagcacttggccaaccaccccgccgcgacccataccaaagccgtcgccttgggcaccgaagaaacacagacgactatccagcgaccaagatcagagccagacaccggaaacccctgccacaccactaagttgttgcacagagactcagtggacagtgctccaatcctcactgcatttaacagctcacacaaaggacggattaactgtaatagtaacactacacccatagtacatttaaaaggtgatgctaatactttaaaatgtttaagatatagatttaaaaagcattgtacattgtatactgcagtgtcgtctacatggcattggacaggacataatgtaaaacataaaagtgcaattgttacacttacatatgatagtgaatggcaacgtgaccaatttttgtctcaagttaaaataccaaaaactattacagtgtctactggatttatgtctatatgacaaatcttgatactgcatccacaacattactggcgtgctttttgctttgcttttgtgtgcttttgtgtgtctgcctattaatacgtccgctgcttttgtctgtgtctacatacacatcattaatactattggtattactattgtggataacagcagcctctgcgtttaggtgttttattgtatatattgtatttgtttatataccattatttttaatacatacacatgcacgctttttaattacataatgtatatgtacaaaatgtaattgttacatataattgttgtataccataacttactattttttcttttttattttcatatatattttttttttttgtttgtttgtttgttttttaataaactgttatcacttaacaatgcgacacaaacgttctgcaaaacgcacaaaacgtgcatcggctacccaactttataaaacatgcaaacaggcaggtacatgtccacctgacattatacctaaggttgaaggcaaaactattgctgatcaaatattacaatatggaagtatgggtgtattttttggtgggttaggaattggaacagggtcgggtacaggcggacgcactgggtatattccattgggaacaaggcctcccacagctacagatacacttgctcctgtaagaccccctttaacagtagatcctgtgggcccttctgatccttctatagtttctttagtggaagaaactagttttattgatgctggtgcaccaacatctgtaccttccattcccccagatgtatcaggatttagtattactacttcaactgataccacacctgctatattagatattaataatactgttactactgttactacacataataatcccactttcactgacccatctgtattgcagcctccaacacctgcagaaactggagggcattttacactttcatcatccactattagtacacataattatgaagaaattcctatggatacatttattgttagcacaaaccctaacacagtaactagtagcacacccataccagggtctcgcccagtggcacgcctaggattatatagtcgcacaacacaacaagttaaagttgtagaccctgcttttataaccactcccactaaacttattacatatgataatcctgcatatgaaggtatagatgtggataatacattatatttttctagtaatgataatagtattaatatagctccagatcctgactttttggatatagttgctttacataggccagcattaacctctaggcgtactggcattaggtacagtagaattggtaataaacaaacactacgtactcgtagtggaaaatctataggtgctaaggtacattattattatgatttaagtactattgatcctgcagaagaaatagaattacaaactataacaccttctacatatactaccacttcacatgcagcctcacctacttctattaataatggattatatgatatttatgcagatgactttattacagatacttctacaaccccggtaccatctgtaccctctacatctttatcaggttatattcctgcaaatacaacaattccttttggtggtgcatacaatattcctttagtatcaggtcctgatatacccattaatataactgaccaagctccttcattaattcctatagttccagggtctccacaatatacaattattgctgatgcaggtgacttttatttacatcctagttattacatgttacgaaaacgacgtaaacgtttaccatattttttttcagatgtctctttggctgcctagtgaggccactgtctacttgcctcctgtcccagtatctaaggttgtaagcacggatgaatatgttgcacgcacaaacatatattatcatgcaggaacatccagactacttgcagttggacatccctattttcctattaaaaaacctaacaataacaaaatattagttcctaaagtatcaggattacaatacagggtatttagaatacatttacctgaccccaataagtttggttttcctgacacctcattttataatccagatacacagcggctggtttgggcctgtgtaggtgttgaggtaggtcgtggtcagccattaggtgtgggcattagtggccatcctttattaaataaattggatgacacagaaaatgctagtgcttatgcagcaaatgcaggtgtggataatagagaatgtatatctatggattacaaacaaacacaattgtgtttaattggttgcaaaccacctataggggaacactggggcaaaggatccccatgtaccaatgttgcagtaaatccaggtgattgtccaccattggagttaataaacacagttattcaggatggtgatatggttgatactggctttggtgctatggactttactacattacaggctaacaaaagtgaagttccactggatatttgtacatctatttgcaaatatccagattatattaaaatggtgtcagaaccatatggcgacagcttatttttttatttacgaagggaacaaatgtttgttagacatttatttaatagggctggtgctgttggtgaaaatgtaccagacgatttatacattaaaggctctgggtctactgcaaatttagccagttcaaattattttcctacacctagtggttctatggttacctctgatgcccaaatattcaataaaccttattggttacaacgagcacagggccacaataatggcatttgttggggtaaccaactatttgttactgttgttgatactacacgcagtacaaatatgtcattatgtgctgccatatctacttcagaaactacatataaaaatactaactttaaggagtacctacgacatggggaggaatatgatttacagtttatttttcaactgtgcaaaataaccttaactgcagacgttatgacatacatacattctatgaattccactattttggaggactggaattttggtttacaacctcccccaggaggcacactagaagatacttataggtttgtaacatcccaggcaattgcttgtcaaaaacatacacctccagcacctaaagaagatccccttaaaaaatacactttttgggaagtaaatttaaaggaaaagttttctgcagacctagatcagtttcctttaggacgcaaatttttactacaagcaggattgaaggccaaaccaaaatttacattaggaaaacgaaaagctacacccaccacctcatctacctctacaactgctaaacgcaaaaaacgtaagctgtaagtattgtatgtatgttgaattagtgttgtttgttgtgtatatgtttgtatgtgcttgtatgtgcttgtaaatattaagttgtatgtgtgtttgtatgtatggtataataaacacgtgtgtatgtgtttttaaatgcttgtgtaactattgtgtcatgcaacataaataaacttattgtttcaacacctactaattgtgttgtggttattcattgtatataaactatatttgctacatcctgtttttgttttatatatactatattttgtagcgccagcggccattttgtagcttcaaccgaattcggttgcatgctttttggcacaaaatgtgtttttttaaatagttctatgtcagcaactatggtttaaacttgtacgtttcctgcttgccatgcgtgccaaatccctgttttcctgacctgcactgcttgccaaccattccattgttttttacactgcactatgtgcaactactgaatcactatgtacattgtgtcatataaaataaatcactatgcgccaacgccttacataccgctgttaggcacatatttttggcttgttttaactaacctaattgcatatttggcataaggtttaaacttctaaggccaactaaatgtcaccctagttcatacatgaactgtgtaaaggttagtcatacattgttcatttgtaaaactgcacatgggtgtgtgcaaaccgttttgggttacacatttacaagcaacttatataataatactaaactacaataattcatgtataaaactaagggcgtaaccgaaatcggttgaaccgaaaccggttagtataaaagcagacattttatgcaccaaaagagaactgcaatgtttcaggacccacaggagcgacccagaaagttaccacagttatgcacagagctgcaaacaactatacatgatataatattagaatgtgtgtactgcaagcaacagttactgcgacgtgaggtatatgactttgcttttcgggatttatgcatagtatatagagatgggaatccatatgctgtatgtgataaatgtttaaagttttattctaaaattagtgagtatagacattattgttatagtgtgtatggaacaacattagaacagcaatacaacaaaccgttgtgtgatttgttaattaggtgtattaactgtcaaaagccactgtgtcctgaagaaaagcaaagacatctggacaaaaagcaaagattccataatataaggggtcggtggaccggtcgatgtatgtcttgttgcagatcatcaagaacacgtagagaaacccagctgtaatcatgcatggagatacacctacattgcatgaatatatgttagatttgcaaccagagacaactgatctctactgttatgagcaattaaatgacagctcagaggaggaggatgaaatagatggtccagctggacaagcagaaccggacagagcccattacaatattgtaaccttttgttgcaagtgtgactctacgcttcggttgtgcgtacaaagcacacacgtagacattcgtactttggaagacctgttaatgggcacactaggaattgtgtgccccatctgttctcagaaaccataatctacc

SEQ ID NO: 104 - DNA, 7906 bp, Homo sapiens
  source 1..7906: mol_type = genomic DNA; note = UNCseq2791
atggctgatcctgcaggtaccaatggggaagagggtacgggatgtaatggatggttttatgtagaggctgtagtggaaaaaaaaacaggggatgctatatcagatgacgagaacgaaaatgacagtgatacaggtgaagatttggtagattttatagtaaatgataatgattatttaacacaggcagaaacagagacagcacatgcgttgtttactgcacaggaagcaaaacaacatagagatgcagtacaggttctaaaacgaaagtatttgggtagtccacttagtgatattagtggatgtgtagacaataatattagtcctagattaaaagctatatgtatagaaaaacaaagtagagctgcaaaaaggagattatttgaaagcgaagacagcgggtatggcaatactgaagtggaaactcagcagatgttacaggtagaagggcgccatgagactgaaacaccatgtagtcagtatagtggtggaagtgggggtggttgcagtcagtacagtagtggaagtgggggagagggtgttagtgaaagacacactatatgccaaacaccacttacaaatattttaaatgtactaaaaactagtaatgcaaaggcagcaatgttagcaaaatttaaagagttatacggggtgagtttttcagaattagtaagaccatttaaaagtaataaatcaacgtgttgcgattggtgtattgctgcatttggacttacacccagtatagctgacagtataaaaacactattacaacaatattgtttatatttacacattcaaagtttagcatgttcatggggaatggttgtgttactattagtaagatataaatgtggaaaaaatagagaaacaattgaaaaattgctgtctaaactattatgtgtgtctccaatgtgtatgatgatagagcctccaaaattgcgtagtacagcagcagcattatattggtataaaacaggtatatcaaatattagtgaagtgtatggagacacgccagaatggatacaaagacaaacagtattacaacatagttttaatgattgtacatttgaattatcacagatggtacaatgggcctacgataatgacatagtagacgatagtgaaattgcatataaatatgcacaattggcagacactaatagtaatgcaagtgcctttctaaaaagtaattcacaggcaaaaattgtaaaggattgtgcaacaatgtgtagacattataaacgagcagaaaaaaaacaaatgagtatgagtcaatggataaaatatagatgtgatagggtagatgatggaggtgattggaagcaaattgttatgtttttaaggtatcaaggtgtagagtttatgtcatttttaactgcattaaaaagatttttgcaaggcatacctaaaaaaaattgcatattactatatggtgcagctaacacaggtaaatcattatttggtatgagtttaatgaaatttctgcaagggtctgtaatatgttttgtaaattctaaaagccatttttggttacaaccattagcagatgccaaaataggtatgttagatgatgctacagtgccctgttggaactacatagatgacaatttaagaaatgcattggatggaaatttagtttctatggatgtaaagcatagaccattggtacaactaaaatgccctccattattaattacatctaacattaatgctggtacagattctaggtggccttatttacataatagattggtggtgtttacatttcctaatgagtttccatttgacgaaaacggaaatccagtgtatgagcttaatgataagaactggaaatcctttttctcaaggacgtggtccagattaagtttgcacgaggacgaggacaaggaaaacgatggagactctttgccaacgtttaaatgtgtgtcaggacaaaatactaacacattatgaaaatgatagtacagacctacgtgaccatatagactattggaaacacatgcgcctagaatgtgctatttattacaaggccagagaaatgggatttaaacatattaaccaccaggtggtgccaacactggctgtatcaaagaataaagcattacaagcaattgaactgcaactaacgttagaaacaatatataactcacaatatagtaatgaaaagtggacattacaagacgttagccttgaagtgtatttaactgcaccaacaggatgtataaaaaaacatggatatacagtggaagtgcagtttgatggagacatatgcaatacaatgcattatacaaactggacacatatatatatttgtgaagaagcatcagtaactgtggtagagggtcaagttgactattatggtttatattatgttcatgaaggaatacgaacatattttgtgcagtttaaagatgatgcagaaaaatatagtaaaaataaagtatgggaagttcatgcgggtggtcaggtaatattatgtcctacatctgtgtttagcagcaacgaagtatcctctcctgaaattattaggcagcacttggccaaccaccccgccgcgacccataccaaagccgttgccttgggcaccgaagaaacacagacgactatccagcgaccaagatcagagccagacaccggaaacccctgccacaccactaagttgttgcacagagactcagtggacagtgctccaatcctcactgcatttaacagctcacacaaaggacggattaactgtaatagtaacactacacccatagtacatttaaaaggtgatgctaatactttaaaatgtttaagatatagatttaaaaagcattgtacattgtatactgcagtgtcgtctacatggcattggacaggacataatgtaaaacataaaagtgcaattgttacacttacatatgatagtgaatggcaacgtgaccaatttttgtctcaagttaaaataccaaaaactattacagtgtctactggatttatgtctatatgacaaatcttgatacagcatccacaacattactggcgtgctttttgctttgcttttgtgtgcttttgtgtgtctgcctattaatacgtccgctgcttttgtctgtgtctacatacacatcattaataatattggtattactattgtggataacagcagcctctgcgtttaggtgttttattgtatatattatatttgtttatataccattatttttaatacatacacatgcacgctttttaattacataatgtatatgtacataatgtaattgttacatataattgttgtataccataacttactattttttgttttttattttcatatatattttttttttttgtttgtttgtttgttttttaataaactgttatcacttaacaatgcgacacaaacgttctgcaaaacgcacaaaacgtgcatcggctacccaactttataaaacatgcaaacaggcaggtacatgtccacctgacattatacctaaggttgaaggcaaaactattgctgatcaaatattacaatatggaagtatgggtgtattttttggtgggttaggaattggaacagggtcgggtacaggcggacgcactgggtatattccattgggaacaaggcctcccacagctacagatacacttgctcctgtaagaccccctttaacagtagatcctgtgggcccttctgatccttctatagtttctttagtggaagaaactagttttattgatgctggtgcaccaacatctgtaccttccattcccccagatgtatcaggatttagtattactacttcaactgataccacacctgctatattagatattaataatactgttactactgttactacacataataatcccactttcactgacccatctgtattgcagcctccaacacctgcagaaactggagggcattttacactttcatcatccactattagtacacataattatgaagaaattcctatggatacatttattgttagcacaaaccctaacacagtaactagtagcacacccataccagggtctcgcccagtggcacgcctaggattatatagtcgcacaacacaacaagttaaagttgtagaccctgcttttgtaaccactcccactaaacttattacatatgataatcctgcatatgaaggtatagatgtggataatacattatatttttctagtaatgataatagtattaatatagctccagatcctgactttttggatatagttgctttacataggccagcattaacctctaggcgtactggcattaggtacagtagaattggtaataaacaaacactacgtactcgtagtggaaaatctataggtgctaaggtacattattattatgatttcagtactattgatcctgcagaagaaatagaattacaaactataacaccttctacatatactaccacttcacatgcagcctcacctacttctattaataatggattatatgatatttatgcagatgactttattacagatacttctacaaccccggtaccatctgtaccctctacatctttatcaggttatattcctgcaaatacaacaattccttttggtggtgcatacaatattcctttagtatcaggtcctgatatacccattaatataactgaccaagctccttcattaattcctatagttccagggtctccacaatatacaattattgctgatgcaggtgacttttatttacatcctagttattacatgttacgaaaacgacgtaaacgtttaccatattttttttcagatgtctctttggctgcctagtgaggccactgtctacttgcctcctgtcccagtatctaaggttgtaagcacggatgaatatgttgcacgcacaaacatatattatcatgcaggaacatccagactacttgcagttggacatccctattttcctattaaaaaacctaacaataacaaaatattagttcctaaagtatcaggattacaatacagggtatttagaatacatttacctgaccccaataagtttggttttcctgacacctcattttataatccagatacacagcggctggtttgggcctgtgtaggtgttgaggtaggtcgtggtcagccattaggtgtgggcattagtggccatcctttattaaataaattggatgacacagaaaatgctagtgcttatgcagcaaatgcaggtgtggataatagagaatgtatatctatggattacaaacaaacacaattgtgtttaattggttgcaaaccacctataggggaacactggggcaaaggatccccatgtaccaatgttgcagtaaatccaggtgattgtccaccattagagttaataaacacagttattcaggatggtgatatggttgatactggctttggtgctatggactttactacattacaggctaacaaaagtgaagttccactggatatttgtacatctatttgcaaatatccagattatattaaaatggtgtcagaaccatatggcgacagcttatttttttatttacgaagggaacaaatgtttgttagacatttatttaatagggctggtactgttggtgaaaatgtaccagacgatttatacattaaaggctctgggtctactgccaatttagccagttcaaattattttcctacacctagtggttctatggttacctctgatgcccaaatattcaataaaccttattggttacaacgagcacagggccacaataatggcatttgttggggtaaccaactatttgttactgttgttgatactacacgcagtacaaatatgtcattatgtgctgccatatctacttcagaaactacatataaaaatactaactttaaggagtacctacgacatggggaggaatatgatttacagtttatttttcaactgtgcaaaataaccttaactgcagacgttatgacatacatacattctatgaattccactattttggaggactggaattttggtctacaacctcccccaggaggcacactagaagatacttataggtttgtaacatcccaggcaattgcttgtcaaaaacatacacctccagcacctaaagaagatccccttaaaaaatacactttttgggaagtaaatttaaaggaaaagttttctgcagacctagatcagtttcctttaggacgcaaatttttactacaagcaggattgaaggccaaaccaaaatttacattaggaaaacgaaaagctacacccaccacctcatctacctctacaactgctaaacgcaaaaaacgtaagctgtaagtattgtatgtatgttgaattagtgttgtttgttgtgtatatgtttgtatgtgcttgtatgtgcttgtaaatattaagttgtatgtgtgtttgtatgtatggtataataaacacgtgtgtatgtgtttttaaatgcttgtgtaactattgtgtcatgcaccataaataaacttattgtttcaacacctactaattgtgttgtggttattcattgtatataaactatatttgctacatcctgtttttgttttatatatactatattttgtagcgccagcggccattttgtagcttcaaccgaattcggttgcatgctttttggcacaaaatgtgtttttttaaatagttctatgtcagcaactatggtttaaacttgtacgtttcctgcttgccatgcgtgccaaatccctgttttcctgacctgcactgcttgccaaccattccattgttttttacactgcactatgtgcaactactgaatcactatgtacattgtgtcatataaaataaatcactatgcgccaacgccttacataccgctgttaggcacatatttttggcttgttttaactaacctaattgcatatttggcataaggtttaaacttctaaggccaactaaatgtcaccctagttcatacatgaactgtgtaaaggttagtcatacattgttcatttgtaaaactgcacatgggtgtgtgcaaaccgttttgggttacacatttacaagcaacttatataataatactaaactacaataattcatgtataaaactaagggcgtaaccgaaatcggttgaaccgaaaccggttagtataaaagcagacattttatgcaccaaaagagaactgcaatgtttcaggacccacaggagcgacccagaaagttaccacagttatgcacagagctgcaaacaactatacatgatataatattagaatgtgtgtactgcaagcaacagttactgcgacgtgaggtatatgactttgcttttcgggatttatgcatagtatatagagatgggaatccatatgctgtatgtgataaatgtttaaagttttattctaaaattagtgagtatagacattattgttatagtttgtatggaacaacattagaacagcaatacaacaaaccgttgtgtgatttgttaattaggtgtattaactgtcaaaagccactgtgtcctgaagaaaagcaaagacatctggacaaaaagcaaagattccataatataaggggtcggtggaccggtcgatgtatgtcttgttgcagatcatcaagaacacgtagagaaacccagctgtaatcatgcatggagatacacctacattgcatgaatatatgttagatttgcaaccagagacaactgatctctactgttatgagcaattaaatgacagctcagaggaggaggatgaaatagatggtccagctggacaagcagaaccggacagagcccattacaatattgtaaccttttgttgcaagtgtgactctacgcttcggttgtgcgtacaaagcacacacgtagacattcgtactttggaagacctgttaatgggcacactaggaattgtgtgccccatctgttctcagaaaccataatctacc

SEQ ID NO: 105 - DNA, 7906 bp, Homo sapiens
  source 1..7906: mol_type = genomic DNA; note = UNCseq2792
atggctgatcctgcaggtaccaatggggaagagggtacgggatgtaatggatggttttatgtagaggctgtagtggaaaaaaaaacaggggatgctatatcagatgacgagaacgaaaatgacagtgatacaggtgaagatttggtagattttatagtaaatgataatgattatttaacacaggcagaaacagagacagcacatgcgttgtttactgcacaggaagcaaaacaacatagagatgcagtacaggttctaaaacgaaagtatttgggtagtccacttagtgatattagtggatgtgtagacaataatattagtcctagattaaaagctatatgtatagaaaaacaaagtagagctgcaaaaaggagattatttgaaagcgaagacagcgggtatggcaatactgaagtggaaactcagcagatgttacaggtagaagggcgccatgagactgaaacaccatgtagtcagtatagtggtggaagtgggggtggttgcagtcagtacagtagtggaagtgggggagagggtgttagtgaaagacacactatatgccaaacaccacttacaaatattttaaatgtactaaaaactagtaatgcaaaggcagcaatgttagcaaaatttaaagagttatacggggtgagtttttcagaattagtaagaccatttaaaagtaataaatcaacgtgttgcgattggtgtattgctgcatttggacttacacccagtatagctgacagtataaaaacactattacaacaatattgtttatatttacacattcaaagtttagcatgttcatggggaatggttgtgttactattagtaagatataaatgtggaaaaaatagagaaacaattgaaaaattgctgtctaaactattatgtgtgtctccaatgtgtatgatgatagagcctccaaaattgcgtagtacagcagcagcattatattggtataaaacaggtatatcaaatattagtgaagtgtatggagacacgccagaatggatacaaagacaaacagtattacaacatagttttaatgattgtacatttgaattatcacagatggtacaatgggcctacgataatgacatagtagacgatagtgaaattgcatataaatatgcacaattggcagacactaatagtaatgcaagtgcctttctaaaaagtaattcacaggcaaaaattgtaaaggattgtgcaacaatgtgtagacattataaacgagcagaaaaaaaacaaatgagtatgagtcaatggataaaatatagatgtgatagggtagatgatggaggtgattggaagcaaattgttatgtttttaaggtatcaaggtgtagagtttatgtcatttttaactgcattaaaaagatttttgcaaggcatacctaaaaaaaattgcatattactatatggtgcagctaacacaggtaaatcattatttggtatgagtttaatgaaatttctgcaagggtctgtaatatgttttgtaaattctaaaagccatttttggttacaaccattagcagatgccaaaataggtatgttagatgatgctacagtgccctgttggaactacatagatgacaatttaagaaatgcattggatggaaatttagtttctatggatgtaaagcatagaccattggtacaactaaaatgccctccattattaattacatctaacattaatgctggtacagattctaggtggccttatttacataatagattggtggtgtttacatttcctaatgagtttccatttgacgaaaacggaaatccagtgtatgagcttaatgataagaactggaaatcctttttctcaaggacgtggtccagattaagtttgcacgaggacgaggacaaggaaaacgatggagactctttgccaacgtttaaatgtgtgtcaggacaaaatactaacacattatgaaaatgatagtacagacctacgtgaccatatagactattggaaacacatgcgcctagaatgtgctatttattacaaggccagagaaatgggatttaaacatattaaccaccaggtggtgccaacactggctgtatcaaagaataaagcattacaagcaattgaactgcaactaacgttagaaacaatatataactcacaatatagtaatgaaaagtggacattacaagacgttagccttgaagtgtatttaactgcaccaacaggatgtataaaaaaacatggatatacagtggaagtgcagtttgatggagacatatgcaatacaatgcattatacaaactggacacatatatatatttgtgaagaagcatcagtaactgtggtagagggtcaagttgactattatggtttatattatgttcatgaaggaatacgaacatattttgtgcagtttaaagatgatgcagaaaaatatagtaaaaataaagtatgggaagttcatgcgggtggtcaggtaatattatgtcctacatctgtgtttagcagcaacgaagtatcctctcctgaaattattaggcagcacttggccaaccactccgccgcgacccataccaaagccgtcgccttgggcaccgaagaaacacagacgactatccagcgaccaagatcagagccagacaccggaaacccctgccacaccactaagttgttgcacagagactcagtggacagtgctccaatcctcactgcatttaacagctcacacaaaggacggattaactgtaatagtaacactacacccatagtacatttaaaaggtgatgctaatactttaaaatgtttaagatatagatttaaaaagcattgtacattgtatactgcagtgtcgtctacatggcattggacaggacataatgtaaaacataaaagtgcaattgttacacttacatatgatagtgaatggcaacgtgaccaatttttgtctcaagttaaaataccaaaaactattacagtgtctactggatttatgtctatatgacaaatcttgatactgcatccacaacattactggcgtgctttttgctttgcttttgtgtgcttttgtgtgtctgcctattaatacgtccgctgcttttgtctgtgtctacatacacatcattaatactattggtattactattgtggataacagcagcctctgcgtttaggtgttttattgtatatattgtatttgtttatataccattatttttaatacatacacatgcacgctttttaattacataatgtatatgtacataatgtaattgttacatataattgttgtataccataacttactattttttcttttttattttcatatataatttttttttttgtttgtttgtttgttttttaataaactgttatcacttaacaatgcgacacaaacgttctgcaaaacgcacaaaacgtgcatcggctacccaactttataaaacatgcaaacaggcaggtacatgtccacctgacattatacctaaggttgaaggcaaaactattgctgatcaaatattacaatatggaagtatgggtgtattttttggtgggttaggaattggaacagggtcgggtacaggcggacgcactgggtatattccattgggaacaaggcctcccacagctacagatacacttgctcctgtaagaccccctttaacagtagatcctgtgggcccttctgatccttctatagtttctttagtggaagaaactagttttattgatgctggtgcaccaacatctgtaccttccattcccccagatgtatcaggatttagtattactacttcaactgataccacacctgctatattagatattaataatactgttactactgttactacacataataatcccactttcactgacccatctgtattgcagcctccaacacctgcagaaactggagggcattttacactttcatcatccactattagtacacataattatgaagaaattcctatggatacatttattgttagcacaaaccctaacacagtaactagtagcacacccataccagggtctcgcccagtggcacgcctaggattatatagtcgcacaacacaacaagttaaagttgtagaccctgcttttgtaaccactcccactaaacttattacatatgataatcctgcatatgaaggtatagatgtggataatacattatatttttctagtaatgataatagtattaatatagctccagatcctgactttttggatatagttgctttacataggccagcattaacctctaggcgtactggcataaggtacagtagaattggtaataaacaaacactacgtactcgtagtggaaaatctataggtgctaaggtacattattattatgatttaagtactattgatcctgcagaagaaatagaattacaaactataacaccttctacatatactaccacttcacatgcagcctcacctacttctattaataatggattatatgatatttatgcagatgactttattacagatacttctacaaccccggtaccatctgtaccctctacatctttatcaggttatattcctgcaaatacaacaattccttttggtggtgcatacaatattcctttagtatcaggtcctgatatacccattaatataactgaccaagctccttcattaattcctatagttccagggtctccacaatatacaattattgctaatgcaggtgacttttatttacatcctagttattacatgttacgaaaacgacgtaaacgtttaccatattttttttcagatgtctctttggctgcctagtgaggccactgtctacttgcctcctgtcccagtatctaaggttgtaagcacggatgaatatgttgcacgcacaaacatatattatcatgcaggaacatccagactacttgcagttggacatccctattttcctattaaaaaacctaacaataacaaaatattagttcctaaagtatcaggattacaatacagggtatttagaatacatttacctgaccccaataagtttggttttcctgacacctcattttataatccagatacacagcggctggtttgggcctgtgtaggtgttgaggtaggtcgtggtcagccattaggtgtgggcattagtggccatcctttattaaataaattggatgacacagaaaatgctagtgcttatgcagcaaatgcaggtgtggataatagagaatgtatatctatggattacaaacaaacacaattgtgtttaattggttgcaaaccacctataggggaacactggggcaaaggatccccatgtaccaatgttgcagtaaatccaggtgattgtccaccattagagttaataaacacagttattcaggatggtgatatggttgatactggctttggtgctatggactttactacattacaggctaacaaaagtgaagttccactggatatttgtacatctatttgcaaatatccagattatattaaaatggtgtcagaaccatatggcgacagcttatttttttatttacgaagggaacaaatgtttgttagacatttatttaatagggctggtgctgttggtgaaaatgtaccagacgatttatacattaaaggctctgggtctactgcaaatttagccagttcaaattattttcctacacctagtggttctatggttacctctgatgcccaaatattcaataaaccttattggttacaacgagcacagggccacaataatggcatttgttggggtaaccaactatttgttactgttgttgatactacacgcagtacaaatatgtcattatgtgctgccatatctacttcagaaactacatataaaaatactaactttaaggagtacctacgacatggggaggaatatgatttacagtttatttttcaactgtgcaaaataaccttaactgcagacgttatgacatacatacattctatgaattccactattttggaggactggaattttggtttacaacctcccccaggaggcacactagaagatacttataggtttgtaacatcccaggcaattgcttgtcaaaaacatacacctccagcacctaaagaagatccccttaaaaaatacactttttgggaagtaaatttaaaggaaaagttttctgcagacctagatcagtttcctttaggacgcaaatttttactacaagcaggattgaaggccaaaccaaaatttacattaggaaaacgaaaagctacacccaccacctcatctacctctacaactgctaaacgcaaaaaacgtaagctgtaagtattgtatgtatgttgaattagtgttgtttgttgtttatatgtttgtatgtgcttgtatgtgcttgtaaatattaagttgtatgtgtgtttgtatgtatggtataataaacacgtgtgtatgtgtttttaaatgcttgtgtaactattgtgtcatgcaacataaataaacttattgtttcaacacctactaattgtgttgtggttattcattgtatataaactatatttgctacatcctgtttttgttttatatatactatattttgtagcgccagcggccattttgtagcttcaaccgaattcggttgcatgctttttggcacaaaatgtgtttttttaaatagttctatgtcagcaactatagtttaaacttgtacgtttcctgcttgccatgcgtgccaaatccctgttttcctgacctgcactgcttgccaaccattccattgttttttacactgcactatgtgcaactactgaatcactatgtacattgtgtcatataaaataaatcactatgcgccaacgccttacataccgctgttaggcacatatttttggcttgttttaactaacctaattgcatatttggcataaggtttaaacttctaaggccaactaaatgtcaccctagttcatacatgaactgtgtaaaggttagtcatacattgttcatttgtaaaactgcacatgggtgtgtgcaaaccgttttgggttacacatttacaagcaacttatataataatactaaactacaataattcatgtataaaactaagggcgtaaccgaaatcggttgaaccgaaaccggttagtataaaagcagacattttatgcaccaaaagagaactgcaatgtttcaggacccacaggagcgacccagaaagttaccacagttatgcacagagctgcaaacaactatacatgatataatattagaatgtgtgtactgcaagcaacagttactgcgacgtgaggtatatgactttgcttttcgggatttatgcatagtatatagagatgggaatccatatgctgtatgtgataaatgtttaaagttttattctaaaattagtgagtatagacattattgttatagtgtgtatggaacaacattagaacagcaatacaacaaaccgttgtgtgatttgttaattaggtgtattaactgtcaaaagccactgtgtcctgaagaaaagcaaagacatctggacaaaaagcaaagattccataatataaggggtcggtggaccggtcgatgtatgtcttgttgcagatcatcaagaacacgtagagaaacccagctgtaatcatgcatggagatacacctacattgcatgaatatatgttagatttgcaaccagagacaactgatctctactgttatgagcaattaaatgacagctcagaggaggaggatgaaatagatggtccagctggacaagcagaaccggacagagcccattacaatattgtaaccttttgttgcaagtgtgactctacgcttcggttgtgcgtacaaagcacacacgtagacattcgtactttggaagacctgttaatgggcacactaggaattgtgtgccccatctgttctcagaaaccataatctacc

SEQ ID NO: 106 - DNA, 7906 bp, Homo sapiens
  source 1..7906: mol_type = genomic DNA; note = UNCseq2794
atggctgatcctgcaggtaccaatggggaagagggtacgggatgtaatggatggttttatgtagaggctgtagtggaaaaaaaaacaggggatgctatatcagatgacgagaacgaaaatgacagtgatacaggtgaagatttggtagattttatagtaaatgataatgattatttaacacaggcagaaacagagacagcacatgcgttgtttactgcacaggaagcaaaacaacatagagatgcagtacaggttctaaaacgaaagtatttgggtagtccacttagtgatattagtggatgtgtagacaataatattagtcctagattaaaagctatatgtatagaaaaacaaagtagagctgcaaaaaggagattatttgaaagcgaagacagcgggtatggcaatactgaagtggaaactcagcagatgttacaggtagaagggcgccatgagactgaaacaccatgtagtcagtatagtggtggaagtgggggtggttgcagtcagtacagtagtggaagtgggggagagggtgttagtgaaagacacactatatgccaaacaccacttacaaatattttaaatgtactaaaaactagtaatgcaaaggcagcaatgttagcaaaatttaaagagttatacggggtgagtttttcagaattagtaagaccatttaaaagtaataaatcaacgtgttgcgattggtgtattgctgcatttggacttacacccagtatagctgacagtataaaaacactattacaacaatattgtttatatttacacattcaaagtttagcatgttcatggggaatggttgtgttactattagtaagatataaatgtggaaaaaatagagaaacaattgaaaaattgctgtctaaactattatgtgtgtctccaatgtgtatgatgatagagcctccaaaattgcgtagtacagcagcagcattatattggtataaaacaggtatatcaaatattagtgaagtgtatggagacacgccagaatggatacaaagacaaacagtattacaacatagttttaatgattgtacatttgaattatcacagatggtacaatgggcctacgataatgacatagtagacgatagtgaaattgcatataaatatgcacaattggcagacactaatagtaatgcaagtgcctttctaaaaagtaattcacaggcaaaaattgtaaaggattgtgcaacaatgtgtagacattataaacgagcagaaaaaaaacaaatgagtatgagtcaatggataaaatatagatgtgatagggtagatgatggaggtgattggaagcaaattgttatgtttttaaggtatcaaggtgtagagtttatgtcatttttaactgcattaaaaagatttttgcaaggcatacctaaaaaaaattgcatattactatatggtgcagctaacacaggtaaatcattatttggtatgagtttaatgaaatttctgcaagggtctgtaatatgttttgtaaattctaaaagccatttttggttacaaccattagcagatgccaaaataggtatgttagatgatgctacagtgccctgttggaactacatagatgacaatttaagaaatgcattggatggaaatttagtttctatggatgtaaagcatagaccattggtacaactaaaatgccctccattattaattacatctaacattaatgctggtacagattctaggtggccttatttacataatagattggtggtgtttacatttcctaatgagtttccatttgacgaaaacggaaatccagtgtatgagcttaatgataagaactggaaatcctttttctcaaggacgtggtccagattaagtttgcacgaggacgaggacaaggaaaacgatggagactctttgccaacgtttaaatgtgtgtcaggacaaaatactaacacattatgaaaatgatagtacagacctacgtgaccatatagactattggaaacacatgcgcctagaatgtgctatttattacaaggccagagaaatgggatttaaacatattaaccaccaggtggtgccaacgctggctgtatcaaagaataaagcattacaagcaattgaactgcaactaacgttagaaacaatatataactcacaatatagtaatgaaaagtggacattacaagacgttagccttgaagtgtatttaactgcaccaacaggatgtataaaaaaacatggatatacagtggaagtgcagtttgatggagacatatgcaatacaatgcattatacaaactggacacatatatatatttgtgaagaagcatcagtaactgtggtagagggtcaagttgactattatggtttatattatgttcatgaaggaatacgaacatattttgtgcagtttaaagatgatgcagaaaaatatagtaaaaataaagtatgggaagttcatgcgggtggtcaggtaatattatgtcctacatctgtgtttagcagcaacgaagtatcctctcctgaaactattaggcagcacttggccaaccactccgccgcgacccataccaaagccgtcgccttgggcaccgaagaaacacagacgactatccagcgaccaagatcagagccagacaccggaaacccctgccacaccactaagttgttgcacagagactcagtggacagtgctccaatcctcactgcatttaacagctcacacaaaggacggattaactgtaatagtaacactacacccatagtacatttaaaaggtgatgctaatactttaaaatgtttaagatatagatttaaaaagcattgtacattgtatactgcagtgtcgtctacatggcattggacaggacataatgtaaaacataaaagtgcaattgttacacttacatatgatagtgaatggcaacgtgaccaatttttgtctcaagttaaaataccaaaaactattacagtgtctactggatttatgtctatatgacaaatcttgatactgcatccacaacattactggcgtgctttttgctttgcttttgtgtgcttttgtgtgtctgcctattaatacgtccgctgcttttgtctgtgtctacatacacatcattaatactattggtattactattgtggataacagcagcctctgcgtttaggtgttttattgtatatattatatttgtttatataccattatttttaatacatacacatgcacgctttttaattacataatgtatatgtacataatgtaattgttacatataattgttgtataccataacttactattttttcttttttattttcatatataatttttttttttgtttgtttgtttgttttttaataaactgttattacttaacaatgcgacacaaacgttctgcaaaacgcacaaaacgtgcatcggctacccaactttataaaacatgcaaacaggcaggtacatgtccacctgacattatacctaaggttgaaggcaaaactattgctgatcaaatattacaatatggaagtatgggtgtattttttggtgggttaggaattggaacagggtcgggtacaggcggacgcactgggtatattccattgggaacaaggcctcccacagctacagatacacttgctcctgtaagaccccctttaacagtagatcctgtgggcccttctgatccttctatagtttctttagtggaagaaactagttttattgatgctggtgcaccaacatctgtaccttccattcccccagatgtatcaggatttagtattactacttcaactgataccacacctgctatattagatattaataatactgttactactgttactacacataataatcccactttcactgacccatctgtattgcagcctccaacacctgcagaaactggagggcattttacactttcatcatccactattagtacacataattatgaagaaattcctatggatacatttattgttagcacaaaccctaacacagtaactagtagcacacccataccagggtctcgcccagtggcacgcctaggattatatagtcgcacaacacaacaagttaaagttgtagaccctgcttttgtaaccactcccactaaacttattacatatgataatcctgcatatgaaggtatagatgtggataatacattatattttcctagtaatgataatagtattaatatagctccagatcctgactttttggatatagttgctttacataggccagcattaacctctaggcgtactggcattaggtacagtagaattggtaataaacaaacactacgtactcgtagtggaaaatctataggtgctaaggtacattattattatgatttgagtactattgatcctgcagaagaaatagaattacaaactataacaccttctacatatactaccacttcacatgcagcctcacctacttctattaataatggattatatgatatttatgcagatgactttattacagatacttctacaaccccggtaccatctgtaccctctacatctttatcaggttatattcctgcaaatacaacaattccttttggtggtgcatacaatattcctttagtatcaggtcctgatatacccattaatataactgaccaagctccttcattaattcctatagttccagggtctccacaatatacaattattgctgatgcaggtgacttttatttacatcctagttattacatgttacgaaaacgacgtaaacgtttaccatattttttttcagatgtctctttggctgcctagtgaggccactgtctacttgcctcctgtcccagtatctaaggttgtaagcacggatgaatatgttgcacgcacaaacatatattatcatgcaggaacatccagactacttgcagttggacatccctattttcctattaaaaaacctaacaataacaaaatattagttcctaaagtatcaggattacaatacagggtatttagaatacatttacctgaccccaataagtttggttttcctgacacctcattttataatccagatacacagcggctggtttgggcctgtgtaggtgttgaggtaggtcgtggtcagccattaggtgtgggcattagtggccatcctttattaaataaattggatgacacagaaaatgctagtgcttatgcagcaaatgcaggtgtggataatagagaatgtatatctatggattacaaacaaacacaattgtgtttaattggttgcaaaccacctataggggaacactggggcaaaggatccccatgtaccaatgttgcagtaaatccaggtgattgtccaccattagagttaataaacacagttattcaggatggtgatatggttgatactggctttggtgctatggactttactacattacaggctaacaaaagtgaagttccactggatatttgtacatctatttgcaaatatccagattatattaaaatggtgtcagaaccatatggcgacagcttatttttttatttacgaagggaacaaatgtttgttagacatttatttaatagggctggtgctgttggtgaaaatgtaccagacgatttatacattaaaggctctgggtctactgcaaatttagccagttcaaattattttcctacacctagtggttctatggttacctctgatgcccaaatattcaataaaccttattggttacaacgagcacagggccacaataatggcatttgttggggtaaccaactatttgttactgttgttgatactacacgcagtacaaatatgtcattatgtgctgccatatctacttcagaaactacatataaaaatactaactttaaggagtacctacgacatggggaggaatatgatttacagtttatttttcaactgtgcaaaataaccttaactgcagacgttatgacatacatacattctatgaattccactattttggaggactggaattttggtctacaaccccccccaggaggcacactagaagatacttataggtttgtaacatcccaggcaattgcttgtcaaaaacatacacctccagcacctaaagaagatccccttaaaaaatacactttttgggaagtaaatttaaaggaaaagttttctgcagacctagatcagtttcctttaggacgcaaatttttactacaagcaggattgaaggccaaaccaaaatttacattaggaaaacgaaaagctacacccaccacctcatctacctctacaactgctaaacgcaaaaaacgtaagctgtaagtattgtatgtatgttgaattagtgttgtttgttgtgtatatgtttgtatgtgcttgtatgtgcttgtaaatattaagttgtatgtgtgtttgtatgtatggtataataaacacgtgtgtatgtgtttttaaatgcttgtgtaactattgtgtcatgcaacataaataaacttattgtttcaacacctactaattgtgttgtggttattcattgtatataaactatatttgctacatcctgtttttgttttatatatactatattttgtagcgccagcggccattttgtagcttcaaccgaattcggttgcatgctttttggcacaaaatgtgtttttttaaatagttctatgtcagcaactatggtttaaacttgtacgtttcctgcttgccatgcgtgccaaatccctgttttcctgacctgcactgcttgccaaccattccattgttttttacactgcactatgtgcaactactgaatcactatgtacattgtgtcatataaaataaatcactatgcgccaacgccttacataccgctgttaggcacatatttttggcttgttttaactaacctaattgcatatttggcataaggtttaaacttctaaggccaactaaatgtcaccctagttcatacatgaactgtgtaaaggttagtcatacattgttcatttgtaaaactgcacatgggtgtgtgcaaaccgttttgggttacacatttacaagcaacttatataataatactaaactacaataatccatgtataaaactaagggcgtaaccgaaatcggttgaaccgaaaccggttagtataaaagcagacattttatgcaccaaaagagaactgcaatgtttcaggacccacaggagcgacccggaaagttaccacagttatgcacagagctgcaaacaactatacatgatataatattagaatgtgtgtactgcaagcaacagttactgcgacgtgaggtatatgactttgcttttcgggatttatgcatagtatatagagatgggaatccatatgctgtatgtgataaatgtttaaagttttattctaaaattagtgagtatagacattattgttatagtgtgtatggaacaacattagaacagcaatacaacaaaccgttgtgtgatttgttaattaggtgtattaactgtcaaaagccactgtgtcctgaagaaaagcaaagacatctggacaaaaagcaaagattccataatataaggggtcggtggaccggtcgatgtatgtcttgttgcagatcatcaagaacacgtagagaaacccagctgtaatcatgcatggagatacacctacattgcatgaatatatgttagatttgcaaccagagacaactgatctctactgttatgagcaattaaatgacagctcagaggaggaggatgaaatagatggtccagctggacaagcagaaccggacagagcccattacaatattgtaaccttttgttgcaagtgtgactctacgcttcggttgtgcgtacaaagcacacacgtagacattcgtactttggaagacctgttaatgggcacactaggaattgtgtgccccatctgttctcagaaaccataatctacc

SEQ ID NO: 107 - DNA, 7906 bp, Homo sapiens
  source 1..7906: mol_type = genomic DNA; note = UNCseq2795
atggctgatcctgcaggtaccaatggggaagagggtacgggatgtaatggatggttctatgtagaggctgtagtggaaaaaaaaacaggggatgctatatcagatgacgagaacgaaaatgacagtgatacaggtgaagatttggtagattttatagtaaatgataatgattatttgacacaggcagaaacagagacagcacatgcgttgtttactgcacaggaagcaaaagaacatagagatgcagtacaggttctaaaacgaaagtatttgggtagtccacttagtgatattagtgaatgtgtagacaataatattagtcctagattaaaagccatatgtatagaaaaacaaagtagagctgcaaaaaggagattatttgaaagcgaagacagcgggtatggcaatactgaagtggaaactcagcagatgttacaggtagaagggcgccatgagactgaaacaccatgtagtcagtatagtggtggaagtgggggtggtagcagtcagtatagtagtggaagtgggggagagggtgttagtgaaagacacactatatgcgaaacaccacttacaaatattttaaatgtactaaaaactagtaatgcaaaggcagcaatgctagcaaaatttaaagagttatacggggtgagttttacagaattagtaagaccatttaaaagtaataaatcaacgtgttgcgattggtgtattgctgcatttggacttacacccagtatagctgacagtataaaaacattattacaacaatattgtttatatttacacattcaaagtttagcgtgttcatggggaatggttgtgttactattagtaagatataaatgtggaaaaaatagagaaacaattgaaaaattgatgtctaaactattatgtgtgtctccaatgtgtatgatgatagagcctccaaaattgcgtagtacagcagcagcattatattggtataaaacaggtatgtcaaatattagtgaagtgtatggagacacgccagaatggatacaaagacaaacagtattacaacatagttttaatgattgtacatttgaattatcacagatggtacaatgggcctacgataatgacatagtagacgatagtgaaattgcatataaatatgcacaattggcagacactaatagtaatgcaagtgcctttttaaaaagtaattcacaggcaaaaattgtaaaggattgtgcaacaatgtgtagacattataaacgagcagaaaaaaaacaaatgagtatgagtcaatggataaaatatagatgtgatagggtagatgatggaggtgattggaagcaaattgttatgtttttaaggtatcaaggtgtagactttatgtcatttttaagtgcattaaaaaaatttctgcaaggtatacctaaaaaaaattgcatattattatatggtgcagctaacacaggtaaatcattatttggtatgagtttaatgaaattcttgcaagggtctgtaatatgttttgtaaattctaaaagccatttttggttacaaccattagcagatgccaaaataggtatgttagatgatgctacagtgccctgttggaactacatagatgacaatttaagaaatgcattggatggaaatttagtttctatggatgtaaagcatagaccattggtacaactaaaatgccctccattattaattacatctaacattaatgctggtacagattccaggtggccttatttacataatcgattggtggtgtttacatttccaaatgagtttccatttgacaaaaacggaaatccagtgtatgagcttaatgataagaactggaaatcctttttctcaaggacgtggtccagattaagtttgcacgaggacgaggacaaggaaaacgatggagactctttgccaacgtttaaatgtgtgtcaggacaaaatactaacacattatgaaaatgatagtacagacctacgtgaccatatagactattggaaacaaatgcgcctagaatgtgctatttattacaaggccagagaaatgggatttaaacatattaaccaccaggtggtgccaacactggctgtatcaaagaataaagcattacaagcaattgaactgcaactaacgttagaaacaatatataactcacaatatagtaatgaaaagtggacattacaagacgttagccttgaagtgtatttaactgcaccaacaggatgtataaaaaaacatggatatacagtggaagtgcagtttgatggagacatatgcaatacaatgcattatacaaactggaaacatatatatatttgtgaagacacatcagtaactgtggtagagggtcaagttgactattatggtatatattatgttcatgaaggaatacaaacatattttgtgcagtttaaagatgatgcagaaaaatatagtaaaaataaagtatgggaagttcatgcgggtggtcaggtaatattatgtcctacatctgtgtttagcagcgacgaagtatcctctgctgaaattactaggcagcacttggccaaccactccgccgcgacccataccaaagccgtcgccttgggcaccaaagaaacacagacgactatccagcgaccaagatcagagccagacaccggaaacccctgccacaccaacaagttgttgcacagagactccgtggacagtgctccaatcctcactgcatttaacagctcacacaaaggacggattaactgtaatagtaacactacacccatagtacatttaaaaggtgatgctaatactttaaaatgtttaagatacagatttaaaaagcattgtaaattgtatacagcagtgtcgtccacatggcattggacaggacataatgtaaaacataaaagtgcaattgttacacttacatatgatagtgaatgtcaacgtgaacaatttttgtctcaagtgaaaataccaaaaactattacagtgtctactggatttatgtctatatgacaaatcttgatactgcatccacaacattactggcgtgctttttgctttgcttttgtgtgcttttgtgtgtctgcctattaatacgtccgctgcttttgtctgtgtctacatacacatcattaatactattggtattagtattgtggataacagcagcctctgcatttaggtgttttattgtatatattgtatttgtttatataccattatttttaatacatacacatgcacgcttcttaattacataatgtatatgtacataatgtaattgttacatataattgttgtataccataaattactatttttttttttttattttcatatatagtttttttttttgtttgtttgtgtgttttttaataaactgttattacttaacaatgcgacacaaacgttctgcaaaacgcacaaaacgtgcatcggccacccaactttataaaacatgcaaacaggcaggtacatgtccacctgacattatacctaaggttgaaggcaaaactattgctgatcaaatattacaatatggaagtatgggtgtattttttggtgggttaggaattggaacagggtctggtacaggcggacgcactgggtacattccattaggaacaaggcctcccacagctacagatacacttgctcctgtaagaccccctttaacagtagatcctgtgggcccttctgatccttctatagtttctttagtggaagaaactagttttattgatgctggtgcaccaacccctgtaccttccattcccccagatgtatcaggatttagtattacaacttcaactgataccacacctgctatattagatattaataatactgttactactgttactacacataataatcccacttttactgacccatctgtattgcagcctccaacacctgcagaaactggagggcattttacactttcatcatccactattagtacacataattatgaagaaattcctatggatacatttattgttagcacaaaccctaacacagtaactagtagcacacccataccggggtctcgcccagtggcacgcctaggattatatagtcgcacaacacaacaagttaaggttgtggaccctgcttttgtaaccgctcccactaaacttattacatatgataatcctgcatatgaaggtatagatgtggataatacattttattttcctagtaatgataatagtattaatatagctccagatcctgactttttggatatagttgctttacataggccagcattaacctctaggcgtactggcattagatacagtagaattggtaataaacaaacactacgtactcgtagtggaaaatctataggtgctaaggtacattattattatgatttaagtagtattaatcctgcagaagaaatagaattacaaactataacaccttctacatatacaaccacttcccatgcagcctcacctacttctattaataatggattatatgatatttatgcagatgactttattacagatactgctacaaccccagtaccagctataccctctacatccttatcaggttatattcctgcaaatacaacaattccttttggtggtgcatacaatattcctttagtatcaggacctgatatacctattaatacaactgaccaaactccttcattaattcctatagttccagggtctccacaatatacaattattgctgatggaggtgacttttatttacatcctagttattacatgttacgaaaacgacgtaaacgtttaccatattttttttcagatgtctctttggctgcctagtgaggccactgtctacttgcctcctgtcccagtatctaaagttgtaagcacggatgaatatgttgcacgcacaaacatatattatcatgcaggaacatccagactacttgcagttggacatccctattttcctattaaaaaacctaacaataacaaaatattagttcctaaagtatcaggattacaatacagggtatttagaatatatttacctgaccccaataagtttggttttcctgacacctcattttacaatccagatacacagcggctggtttgggcctgtgtaggtgttgaggtaggtcgtggtcagccattaggtgtgggcattagtggccatcctttattaaataaattggatgacacagaaaatgctagtgcttatgcagcaaatgcaggtgtggataatagagaatgtatatctatggattacaaacaaacacaattgtgtttaattggttgcaaaccacctataggggaacactggggcaaaggatccccatgtaacaatgttgcagtaactccaggtgattgtccaccattagagttaataaacacagttattcaggatggtgatatggttgataccggctttggtgctatggactttactacattacaggctaacaaaagtgaagttccactggatatttgtacatctatttgcaaatatccagattatattaaaatggtgtcagaaccatatggcgacagcttatttttttatttacgaagggaacaaatgtttgttagacatttatttaatagggctggtgctgttggtgaaaatgtaccagacgatttatacattaaaggctctgggtctactgcaaatttagccagttcaaattattttcctacacctagtggttctatggttacctctgatgcccaaatattcaataaaccttattggttacaacgagcacagggccacaataatggcatttgttggggtaaccaactatttgttactgttgttgatactacacgcagtacaaatatgtcattatgtgctgccatatctacttcagaacctacatataaaaatactaactttaaagagtacctacgacatggggaggaatatgatttacagtttatttttcaactgtgcaaaataaccttaactgcagacgttatgtcatacatacattctatgaattccactattttggaggactggaattttggtttacaacctcctccaggaggcacactagaagatacttataggtttgtaacatcccaggcaattgcttgtcaaaaacatacacctccagcacctaaagaagatccccttaaaaaatatactttttgggaagtaaatttaaaagaaaagttttctgcagacctagatcagtttcctttaggacgcaaatttttactacaagcaggatttaaggccaaaccaaaatttacattaggaaaacgaaaagctacacccaccacctcatctacctctacaactgctaaacgcaaaaaacgtaagctgtaagtattgtatgtatgttgaattagtgttgtttgttgtttatatgtttgtatgtgcttgtatgtgcttgtaaatattacgttgtatgtgtgtttgtatgtatggtataataaacacgtgtgtatgtgtttttaaatgcttgtgtaactattgtgtcatgcaacataaataaacttattgtttcatcacctactaattgtgttgtggttattcattgtatataaactatatttgctacattttgtttttgttttatatatactatattttgtagcgccagcggccattttgtagcttcaaccgaattcggttgcatgctttttggcacaaactgtatttttttaaatagttctatgtcagcaactatagtttaaacttgtacgtttcctgcttgccatgcgtgccaaatccctgttttcctgacctgcgctgcttgccaaccattccattgttttttacactgcactatgtgcaactactgaatcactatgtacattgtgtcatataaaataaattactatgcgccaacgccttaaataccgctgttaggcacatatttttggcttgttttaactcacctaattgcatagttggcataaggtttaaacttttaaggccaactaaatgtcaccttagttcatacatgaactgtgtaaaggttagtcatacattgttcatttgtaaaactgcacatgggtgtgtgcaaaccgttttgggttacacatttacaaggaacttatataataatactaaactacaataattcatgtataaaactaagggcgtaaccgaaatcggttgaaccgaaaccggttagtataaaagcagacattttatgcaccaaaagagaactgcaatgtttcaggacccacaggagcgacccagaaagttaccacatttatgcacagagctgcaaacaactatacatgatataatattagaatgtgtgtactgcaagcaacagttactgcgacgtgaggtatatgactttgcttttcgggatttatgcatagtatatagagatgggaatccatatgcagtgtgtgataaatgtttaaagttttattctaaaattagtgagtatagatattattgttatagtgtgtatggaacaacattagaacagcaatacaacaaaccgttgtgtgatttgttaattaggtgtattaactgtcaaaagccactgtgtcctgaagaaaagcaaagacatctggacaaaaagcaaagattccataatataaggggtcggtggaccggtcgatgtatgtcttgttgcagatcatcgagaacacgtagagaaacccagctgtaatcatgcatggagatacacctacattgcatgaatatatgttagatttgcaaccagagacaactgatctctactgttatgagcaattaaatgacagctcagaggaggaggatgaaatagatggtccagctggacaagcagaaccggacagagcccattacaatattgtaaccttctgttgcaagtgtgactctacgcttcggttgtgcgtacaaagcacacacgtagacatccgtacgttggaagacctgttaatgggcacactaggaattgtgtgccccatctgttctcagaaaccataatctacc

SEQ ID NO: 108 - DNA, 7904 bp, Human papillomavirus
  source 1..7904: mol_type = genomic DNA; note = sublineage A1; serotype = HPV16
atggctgatcctgcaggtaccaatggggaagagggtacgggatgtaatggatggttttatgtagaggctgtagtggaaaaaaaaacaggggatgctatatcagatgacgagaacgaaaatgacagtgatacaggtgaagatttggtagattttatagtaaatgataatgattatttaacacaggcagaaacagagacagcacatgcgttgtttactgcacaggaagcaaaacaacatagagatgcagtacaggttctaaaacgaaagtatttggtagtccacttagtgatattagtggatgtgtagacaataatattagtcctagattaaaagctatatgtatagaaaaacaaagtagagctgcaaaaaggagattatttgaaagcgaagacagcgggtatggcaatactgaagtggaaactcagcagatgttacaggtagaagggcgccatgagactgaaacaccatgtagtcagtatagtggtggaagtgggggtggttgcagtcagtacagtagtggaagtgggggagagggtgttagtgaaagacacactatatgccaaacaccacttacaaatattttaaatgtactaaaaactagtaatgcaaaggcagcaatgttagcaaaatttaaagagttatacggggtgagtttttcagaattagtaagaccatttaaaagtaataaatcaacgtgttgcgattggtgtattgctgcatttggacttacacccagtatagctgacagtataaaaacactattacaacaatattgtttatatttacacattcaaagtttagcatgttcatggggaatggttgtgttactattagtaagatataaatgtggaaaaaatagagaaacaattgaaaaattgctgtctaaactattatgtgtgtctccaatgtgtatgatgatagagcctccaaaattgcgtagtacagcagcagcattatattggtataaaacaggtatatcaaatattagtgaagtgtatggagacacgccagaatggatacaaagacaaacagtattacaacatagttttaatgattgtacatttgaattatcacagatggtacaatgggcctacgataatgacatagtagacgatagtgaaattgcatataaatatgcacaattggcagacactaatagtaatgcaagtgcctttctaaaaagtaattcacaggcaaaaattgtaaaggattgtgcaacaatgtgtagacattataaacgagcagaaaaaaaacaaatgagtatgagtcaatggataaaatatagatgtgatagggtagatgatggaggtgattggaagcaaattgttatgtttttaaggtatcaaggtgtagagtttatgtcatttttaactgcattaaaaagatttttgcaaggcatacctaaaaaaaattgcatattactatatggtgcagctaacacaggtaaatcattatttggtatgagtttaatgaaatttctgcaagggtctgtaatatgttttgtaaattctaaaagccatttttggttacaaccattagcagatgccaaaataggtatgttagatgatgctacagtgccctgttggaactacatagatgacaatttaagaaatgcattggatggaaatttagtttctatggatgtaaagcatagaccattggtacaactaaaatgccctccattattaattacatctaacattaatgctggtacagattctaggtggccttatttacataatagattggtggtgtttacatttcctaatgagtttccatttgacgaaaacggaaatccagtgtatgagcttaatgataagaactggaaatcctttttctcaaggacgtggtccagattaagtttgcacgaggacgaggacaaggaaaacgatggagactctttgccaacgtttaaatgtgtgtcaggacaaaatactaacacattatgaaaatgatagtacagacctacgtgaccatatagactattggaaacacatgcgcctagaatgtgctatttattacaaggccagagaaatgggatttaaacatattaaccaccaagtggtgccaacactggctgtatcaaagaataaagcattacaagcaattgaactgcaactaacgttagaaacaatatataactcacaatatagtaatgaaaagtggacattacaagacgttagccttgaagtgtatttaactgcaccaacaggatgtataaaaaaacatggatatacagtggaagtgcagtttgatggagacatatgcaatacaatgcattatacaaactggacacatatatatatttgtgaagaagcatcagtaactgtggtagagggtcaagttgactattatggtttatattatgttcatgaaggaatacgaacatattttgtgcagtttaaagatgatgcagaaaaatatagtaaaaataaagtatgggaagttcatgcgggtggtcaggtaatattatgtcctacatctgtgtttagcagcaacgaagtatcctctcctgaaattattaggcagcacttggccaaccaccccgccgcgacccataccaaagccgtcgccttgggcaccgaagaaacacagacgactatccagcgaccaagatcagagccagacaccggaaacccctgccacaccactaagttgttgcacagagactcagtggacagtgctccaatcctcactgcatttaacagctcacacaaaggacggattaactgtaatagtaacactacacccatagtacatttaaaaggtgatgctaatactttaaaatgtttaagatatagatttaaaaagcattgtacattgtatactgcagtgtcgtctacatggcattggacaggacataatgtaaaacataaaagtgcaattgttacacttacatatgatagtgaatggcaacgtgaccaatttttgtctcaagttaaaataccaaaaactattacagtgtctactggatttatgtctatatgacaaatcttgatactgcatccacaacattactggcgtgctttttgctttgctttgtgtgcttttgtgtgtctgcctattaatacgtccgctgcttttgtctgtgtctacatacacatcattaataatattggtattactattgtggataacagcagcctctgcgtttaggtgttttattgtatatattatatttgtttatataccattatttttaatacatacacatgcacgctttttaattacataatgtatatgtacataatgtaattgttacatataattgttgtataccataacttactattttttcttttttattttcatatataatttttttttttgtttgtttgtttgttttttaataaactgttattacttaacaatgcgacacaaacgttctgcaaaacgcacaaaacgtgcatcggctacccaactttataaaacatgcaaacaggcaggtacatgtccacctgacattatacctaaggttgaaggcaaaactattgctgaacaaatattacaatatggaagtatgggtgtattttttggtgggttaggaattggaacagggtcgggtacaggcggacgcactgggtatattccattgggaacaaggcctcccacagctacagatacacttgctcctgtaagaccccctttaacagtagatcctgtgggcccttctgatccttctatagtttctttagtggaagaaactagttttattgatgctggtgcaccaacatctgtaccttccattcccccagatgtatcaggatttagtattactacttcaactgataccacacctgctatattagatattaataatactgttactactgttactacacataataatcccactttcactgacccatctgtattgcagcctccaacacctgcagaaactggagggcattttacactttcatcatccactattagtacacataattatgaagaaattcctatggatacatttattgttagcacaaaccctaacacagtaactagtagcacacccataccagggtctcgcccagtggcacgcctaggattatatagtcgcacaacacaacaggttaaagttgtagaccctgcttttgtaaccactcccactaaacttattacatatgataatcctgcatatgaaggtatagatgtggataatacattatatttttctagtaatgataatagtattaatatagctccagatcctgactttttggatatagttgctttacataggccagcattaacctctaggcgtactggcattaggtacagtagaattggtaataaacaaacactacgtactcgtagtggaaaatctataggtgctaaggtacattattattatgatttaagtactattgatcctgcagaagaaatagaattacaaactataacaccttctacatatactaccacttcacatgcagcctcacctacttctattaataatggattatatgatatttatgcagatgactttattacagatacttctacaaccccggtaccatctgtaccctctacatctttatcaggttatattcctgcaaatacaacaattccttttggtggtgcatacaatattcctttagtatcaggtcctgatatacccattaatataactgaccaagctccttcattaattcctatagttccagggtctccacaatatacaattattgctgatgcaggtgacttttatttacatcctagttattacatgttacgaaaacgacgtaaacgtttaccatattttttttcagatgtctctttggctgcctagtgaggccactgtctacttgcctcctgtcccagtatctaaggttgtaagcacggatgaatatgttgcacgcacaaacatatattatcatgcaggaacatccagactacttgcagttggacatccctattttcctattaaaaaacctaacaataacaaaatattagttcctaaagtatcaggattacaatacagggtatttagaatacatttacctgaccccaataagtttggttttcctgacacctcattttataatccagatacacagcggctggtttgggcctgtgtaggtgttgaggtaggtcgtggtcagccattaggtgtgggcattagtggccatcctttattaaataaattggatgacacagaaaatgctagtgcttatgcagcaaatgcaggtgtggataatagagaatgtatatctatggattacaaacaaacacaattgtgtttaattggttgcaaaccacctataggggaacactggggcaaaggatccccatgtaccaatgttgcagtaaatccaggtgattgtccaccattagagttaataaacacagttattcaggatggtgatatggttcatactggctttggtgctatggactttactacattacaggctaacaaaagtgaagttccactggatatttgtacatctatttgcaaatatccagattatattaaaatggtgtcagaaccatatggcgacagcttatttttttatttacgaagggaacaaatgtttgttagacatttatttaatagggctggtactgttggtgaaaatgtaccagacgatttatacattaaaggctctgggtctactgcaaatttagccagttcaaattattttcctacacctagtggttctatggttacctctgatgcccaaatattcaataaaccttattggttacaacgagcacagggccacaataatggcatttgttggggtaaccaactatttgttactgttgttgatactacacgcagtacaaatatgtcattatgtgctgccatatctacttcagaaactacatataaaaatactaactttaaggagtacctacgacatggggaggaatatgatttacagtttatttttcaactgtgcaaaataaccttaactgcagacgttatgacatacatacattctatgaattccactattttggaggactggaattttggtctacaacctcccccaggaggcacactagaagatacttataggtttgtaacccaggcaattgcttgtcaaaaacatacacctccagcacctaaagaagatgatccccttaaaaaatacactttttgggaagtaaatttaaaggaaaagttttctgcagacctagatcagtttcctttaggacgcaaatttttactacaagcaggattgaaggccaaaccaaaatttacattaggaaaacgaaaagctacacccaccacctcatctacctctacaactgctaaacgcaaaaaacgtaagctgtaagtattgtatgtatgttgaattagtgttgtttgttgtgtatatgtttgtatgtgcttgtatgtgcttgtaaatattaagttgtatgtgtgtttgtatgtatggtataataaacacgtgtgtatgtgtttttaaatgcttgtgtaactattgtgtcatgcaacataaataaacttattgtttcaacacctactaattgtgttgtggttattcattgtatataaactatatttgctacatcctgtttttgttttatatatactatattttgtagcgccaggcccattttgtagcttcaaccgaattcggttgcatgctttttggcacaaaatgtgtttttttaaatagttctatgtcagcaactatggtttaaacttgtacgtttcctgcttgccatgcgtgccaaatccctgttttcctgacctgcactgcttgccaaccattccattgttttttacactgcactatgtgcaactactgaatcactatgtacattgtgtcatataaaataaatcactatgcgccaacgccttacataccgctgttaggcacatatttttggcttgttttaactaacctaattgcatatttggcataaggtttaaacttctaaggccaactaaatgtcaccctagttcatacatgaactgtgtaaaggttagtcatacattgttcatttgtaaaactgcacatgggtgtgtgcaaaccgattttgggttacacatttacaagcaacttatataataatactaaactacaataattcatgtataaaactaagggcgtaaccgaaatcggttgaaccgaaaccggttagtataaaagcagacattttatgcaccaaaagagaactgcaatgtttcaggacccacaggagcgacccagaaagttaccacagttatgcacagagctgcaaacaactatacatgatataatattagaatgtgtgtactgcaagcaacagttactgcgacgtgaggtatatgactttgcttttcgggatttatgcatagtatatagagatgggaatccatatgctgtatgtgataaatgtttaaagttttattctaaaattagtgagtatagacattattgttatagtttgtatggaacaacattagaacagcaatacaacaaaccgttgtgtgatttgttaattaggtgtattaactgtcaaaagccactgtgtcctgaagaaaagcaaagacatctggacaaaaagcaaagattccataatataaggggtcggtggaccggtcgatgtatgtcttgttgcagatcatcaagaacacgtagagaaacccagctgtaatcatgcatggagatacacctacattgcatgaatatatgttagatttgcaaccagagacaactgatctctactgttatgagcaattaaatgacagctcagaggaggaggatgaaatagatggtccagctggacaagcagaaccggacagagcccattacaatattgtaaccttttgttgcaagtgtgactctacgcttcggttgtgcgtacaaagcacacacgtagacattcgtactttggaagacctgttaatgggcacactaggaattgtgtgccccatctgttctcagaaaccataatctacc

SEQ ID NO: 109 - DNA, 7904 bp, Human papillomavirus
  source 1..7904: mol_type = genomic DNA; note = sublineage A2; serotype = HPV16
atggctgatcctgcaggtaccaatggggaagagggtacgggatgtaatggatggttttatgtagaggctgtagtggaaaaaaaaacaggggatgctatatcagatgacgagaacgaaaatgacagtgatacaggtgaagatttggtagattttatagtaaatgataatgattatttaacacaggcagaaacagagacagcacatgcgttgtttactgcacaggaagcaaaacaacatagagatgcagtacaggttctaaaacgaaagtatttgggtagtccacttagtgatattagtggatgtgtagacaataatattagtcctagattaaaagctatatgtatagaaaaacaaagtagagctgcaaaaaggagattatttgaaagcgaagacagcgggtatggcaatactgaagtggaaactcagcagacgttacaggtagaagggcgccatgagactgaaacaccatgtagtcagtatagtggtggaagtgggggtggttgcagtcagtacagtagtggaagtgggggagagggtgttagtgaaagacacactatatgccaaacaccacttacaaatattttaaatgtactaaaaactagtaatgcaaaggcagcaatgttagcaaaatttaaagagttatacggggtgagttttacagaattagtaagaccatttaaaagtaataaatcaacgtgttgcgattggtgtattgctgcatttggacttacacccagtatagctgacagtataaaaacactattacaacaatattgtttatatttacacattcaaagtttagcatgttcatggggaatggttgtgttactattagtaagatataaatgtggaaaaaatagagaaacaattgaaaaattgctgtctaaactattatgtgtgtctccaatgtgtatgatgatagagcctccaaaattgcgtagtacagcagcagcattatattggtataaaacaggtatatcaaatattagtgaagtgtatggagacacgccagaatggatgcaaagacaaacagtattacaacatagttttaatgattgtacatttgaattatcacagatggtacaatgggcctacgataatgacatagtagacgatagtgaaattgcatataaatatgcacaattggcagacactaatagtaatgcaagtgcctttctaaaaagtaattcacaggcaaaaattgtaaaggattgtgcaacaatgtgtagacattataaacgagcagaaaaaaaacaaatgagtatgagtcaatggataaaatatagatgtgatagggtagatgatggaggtgattggaagcaaattgttatgtttttaaggtatcaaggtgtagagtttatgtcatttttaactgcattaaaaagatttttgcaaggcatacctaaaaaaaattgcatattactatatggtgcagctaacacaggtaaatcattatttggtatgagtttaatgaaatttctgcaagggtctgtaatatgttttgtaaattctaaaagccatttttggttacaaccattagcagatgccaaaataggtatgttagatgatgctacagtgccctgttggaactatatagatgacaatttaagaaatgcattggatggaaatttagtttctatggatgtaaagcatagaccattggtacaactaaaatgccctccattattaattacatctaacattaatgctggtacagattctaggtggccttatttacataatagattggtggtgtttacatttcctaatgagtttccatttgacgaaaacggaaatccagtgtatgagcttaatgataagaactggaaatcctttttctcaaggacgtggtccagattaagtttgcacgaggacgaggacaaggaaaacgatggagactctttgccaacgtttaaatgtgtgtcaggacaaaatactaacacattatgaaaatgatagtacagacctacgtgaccatatagactattggaaacacatgcgcctagaatgtgctatttattacaaggccagagaaatgggatttaaacatattaaccaccaggtggtgccaacgctggctgtatcaaagaataaagcattacaagcaattgaactgcaaccaacgctagaaacaatatataactcacaatatagtaatgaaaagtggacattacaagacgttagccttgaagtgtatttaactgcaccaacaggatgtataaaaaaacatggatatacagtggaagtgcagttcgatggagacatatgcaatacaatgcattatacaaactggacacatatatatatttgtgaagaagcatcagtaactgtggtagagggtcaagttgactattatggtttatattatgttcatgaaggaatacgaacatattttgtgcagtttaaagatgatgcagaaaaatatagtaaaaataaagtatgggaagttcatgcgggtggtcaggtaatattatgtcctacatctgtgtttagcagcaacgaagtatcctctcctgaaactattaggcagcacttggccaaccactccgccgcgacccataccaaagccgtcgccttgggcaccgaagaaacacagacgactatccagcgaccaagatcagagccagacaccggaaacccctgccacaccactaagttgttgcacagagactcagtggacagtgctccaatcctcactgcatttaacagctcacacaaaggacggattaactgtaatagtaacactacacccatagtacatttaaaaggtgatgctaatactttaaaatgtttaagatatagatttaaaaagcattgtaaattgtatactgcagtgtcgtctacatggcattggacaggacataatgtaaaacataaaagtgcaattgttacacttacatatgatagtgaatggcaacgtgaccaatttttgtctcaagttaaaataccaaaaactattacagtgtctactggatttatgtctatatgacaaatcttgatactgcatccacaacattactggcgtgctttttgctttgcttttgtgtgcttttgtgtgtctgcctattaatacgtccgctgcttttgtctgtgtctacatacacatcattaatactattggtattactattgtggataacagcagcctctgcgtttaggtgttttattggatatattatatttggttatataccattatttttaatacatacacatgcacgctttttaattacataatgtatatgtacataatgtaattgttacatataattgttgtataccataacttactattttttcttttttatttttatatataattttttttggtttgtttgtttgttttttaataaactgttatcacttaacaatgcgacacaaacgttctgcaaaacgcacaaaacgtgcatcggctacccaactttataaaacatgcaaacaggcaggtacatgtccacctgacattatacctaaggttgaaggcaaaactattgctgatcaaatattacaatatggaagtatgggtgtattttttggtgggttaggaattggaacagggtcgggtacaggcggacgcactgggtatattccattgggaacaaggcctcccacagctacagatacacttgctcctgtaagaccccctttaacagtagatcctgtgggcccttctgatccttctatagtttctttagtggaagaaactagttttattgatgctggtgcaccaacatctgtaccttccatccccccagatgtatcaggatttagtattactacttcaactgataccacacctgctatattagatattaataatactgttactactgttactacacataataatcccactttcactgacccatctgtattgcagcctccaacacctgcagaaactggagggcattttacactttcatcatccactattagtacacataattatgaagaaattcctatggatacatttattgttagcacaaaccctaacacagtaactagtagcacacccataccagggtctcgcccagtggcacgcctaggattatatagtcgcacaacacaacaagttaaagttgtagaccctgcttttgtaaccactcccactaaacttattacatatgataatcctgcatatgaaggtatagatgtggataatacattatattttcctagtaatgataatagtattaatatagctccagatcctgactttttggatatagttgctttacataggccagcattaacctctaggcgtactggcattaggtacagtagaattggtaataaacaaacactacgtactcgtagtggaaaatctataggtgctaaggtacattattattatgatttgagtactattgatcctgcagaagaaatagaattacaaactataacaccttctacatatactaccactttacatgcagcctcacctacttctattaataatggattatatgatatttatgcagatgactttattacagatacttctacaaccccggtaccatctgtaccctctacatctttatcaggttatattcctgcaaatacaacaattccttttggtggtgcatacaatattcctttagtatcaggtcctgatatacccattaatataactgaccaagctccttcattaattcctatagttccagggtctccacaatatacaattattgctgatgcaggtgacttttatttacatcctagttattacatgttacgaaaacgacgtaaacgtttaccatattttttttcagatgtctctttggctgcctagtgaggccactgtctacttgcctcctgtcccagtatctaaggttgtaagcacggatgaatatgttgcacgcacaaacatatattatcatgcaggaacatccagactacttgcagttggacatccctattttcctattaaaaaacctaacaataacaaaatattagttcctaaagtatcaggattacaatacagggtatttagaatacatttacctgaccccaataagtttggttttcctgacacctcattttataatccagatacacagcggctggtttgggcctgtgtaggtgttgaggtaggtcgtggtcagccattaggtgtgggcattagtggccatcctttattaaataaattggatgacacagaaaatgctagtgcttatgcagcaaatgcaggtgtggataatagagaatgtatatctatggattacaaacaaacacaattgtgtttaattggttgcaaaccacctataggggaacactggggcaaaggatccccatgtaccaatgttgcagtaaatccaggtgattgtccaccattagagttaataaacacagttattcaggatggtgatatggttgatactggctttggtgctatggactttactacattacaggctaacaaaagtgaagttccactggatatttgtacatctatttgcaaatatccagattatattaaaatggtgtcagaaccatatggcgacagcttatttttttatttacgaagggaacaaatgtttgttagacatttatttaatagggctggtgctgttggtgaaaatgtaccagacgatttatacattaaaggctctgggtctactgcaaatttagccagttcaaattattttcctacacctagcggttctatggttacctctgatgcccaaatattcaataaaccttattggttacaacgagcacagggccacaataatggcatttgttggggtaaccaactatttgttactgttgttgatactacacgcagtacaaatatgtcattatgtgctgccatatctacttcagaaactacatataaaaatactaactttaaggagtacctacgacatggggaggaatatgatttacagtttatttttcaactgtgcaaaataaccttaactgcagacgttatgacatacatacattctatgaattccactattttggaggactggaattttggtctacaaccccccccaggaggcacactagaagatacttataggtttgtaacatcccaggcaattgcttgtcaaaaacatacacctccagcacctaaagaagatccccttaaaaaatacactttttgggaagtaaatttaaaagaaaagttttctgcagacctagatcagtttcctttaggacgcaaatttttactacaagcaggattgaaggccaaaccaaaatttacattaggaaaacgaaaagctacacccaccacctcatctacctctacaactgctaaacgcaaaaaacgtaagctgtaagtattgtatgtatgttgaattagtgttgtttgttgtttatatgtttgtatgtgcttgtatgtgcttgtaaatattaagttgtatgtgtgtttgtatgtatggtataataaacacgtgtgtatgtgtttttaaatgcttgtgtaactattgtgtgatgcaacataaataaacttactgtttcaacacctgctaattgtgttgtggttattcattgtatataaactatatttgctacatcctgtttttgttttatatatactatattttgtagcgccagcggccattttgtagcttcaaccgaattcggttgcatgctttttggcacaaaatgtgtttttttaaatagttctatgtcagcaactatagtttaaacttgtacgtttcctgcttgccatgcgtgccaaatccctgttctcctgacctgcactgcttgccaaccattccattgttttttacactgcactatgtgcaactactgaatcactatgtacattgtgtcatataaaataaatcactatgcgccaacgccttacataccgctgttaggcacatatttttggcttgttttaactaacctaattgcatatttggcataaggtttaaacttctaaggccaactaaatgtcaccctagttcatacatgaactgtgtaaaggttagtcatacattgttcatttgtaaaactgcacatgggtgtgtgcaaaccgttttgggttacacatttacaagcaacttatataataatgctaaactacaataatccatgtataaaactaagggcgtaaccgaaatcggttgaaccgaaaccggttagtataaaagcagacattttatgcaccaaaagagaactgcaatgtttcaggacccacaggagcgacccggaaagttaccacagttatgcacagagctgcaaacaactatacatgatataatattagaatgtgtgtactgcaagcaacagttactgcgacgtgaggtatatgactttgcttttcgggatttatgcatagtatatagagatgggaatccatatgctgtatgtgataaatgtttaaagttttattctaaaattagtgagtatagacattattgttatagtgtgtatggaacaacattagaacagcaatacaacaaaccgttgtgtgatttgttaattaggtgtattaactgtcaaaagccactgtgtcctgaagaaaagcaaagacatctggacaaaaagcaaagattccataatataaggggtcggtggaccggtcgatgtatgtcttgttgcagatcatcaagaacacgtagagaaacccagctgtaatcatgcatggagatacacctacattgcatgaatatatgttagatttgcaaccagagacaactgatctctactgttatgagcaattaaatgacagctcagaggaggaggatgaaatagatggtccagctggacaagcagaaccggacagagcccattacaatattgtaaccttttgttgcaagtgtgactctacgcttcggttgtgcgtacaaagcacacacgtagacattcgtactttggaagacctgttaatgggcacactaggaattgtgtgccccatctgttctcagaaaccataatctacc

SEQ ID NO: 110 - DNA, 7905 bp, Human papillomavirus
  source 1..7905: mol_type = genomic DNA; note = sublineage A4; serotype = HPV16
atggctgatcctgcaggtaccaatggggaagagagtacgggatgtaatggatggttttatgtagaggctgtagtggaaaaaaaaacaggggatgctatatcagatgacgagaacgaaaatgacagtgatacaggtgaagatttggtagattttatagtaaatgataatgattatttaacacaggcagaaacagagacagcacatgcgttgtttactgcacaggaagcaaaacaacatagagatgcagtacaggttctaaaacgaaagtatttgggtagtccacttagtgatattagtggatgtgtagacaataatattagtcctagattaaaagctatatgtatagaaaaacaaagtagagctgcaaaaaggagattatttgaaagcgaagacagcgggtatggcaatactgaagtggaaactcagcagatgttacaggtagaagggcgccatgagactgaaacaccatgtagtcagtatagtggtggaagtgggggtggttgcagtcagtacagtagtggaagtgggggagagggtgttagtgaaagacacactatatgccaaacaccacttacaaatattttaaatgtactaaaaactagtaatgcaaaggcagcaatgttagcaaaatttaaagagttatacggggtaagtttttcagaattagtaagaccatttaaaagtaataaatcaacgtgttgcgattggtgtattgctgcatttggacttacacccagtatagctgacagtataaaaacactattacaacaatattgtttatatttacacattcaaagtttagcatgttcatggggaatggttgtgttactattagtaagatataaatgtggaaaaaatagagaaacaattgaaaaattgctgtctaaactattatgtgtgtctccaatgtgtatgatgatagagcctccaaaattgcgtagtacagcagcagcattatattggtataaaacaggtatgtcaaatattagtgaagtgtatggagacacgccagaatggatacaaagacaaacagtattacaacatagttttaatgattgtacatttgaattatcacggatggtacaatgggcctacgataatgacatagtagacgatagtgaaattgcatataaatatgcacaattggcagacactaatagtaatgcaagtgcctttctaaaaagtaattcacaggcaaaaattgtaaaggattgtgcaacaatgtgtagacattataaacgagcagaaaaaaaacaaatgagtatgagtcaatggataaaatatagatgtgatagggtagatgatggaggtgattggaagcaaattgttatgtttttaaggtatcaaggtgtagagtttatgccatttttaactgcattaaaaagatttttgcaaggcatacctaaaaaaaattgcatattactatatggcgcagctaacacaggcaaatcattatttggtatgagtttaataaaatttctgcaagggtctgtaatatgttttgtaaattctaaaagccatttttggttacaaccattagcagatgccaaaataggtatgttagatgatgctacagtgccctgttggaactacatagatgacaatttaagaaatgcattggatggaaatttagtttctatggatgtaaagcatagaccattggtacaactaaaatgccctccattattaattacatctaacattaatgctggtacagattctaggtggccttatttacataatagattggtggtgtttacatttcctaatgagtttccatttgacgaaaacggaaatccagtgtatgagcttaatgataagaactggaaatcctttttctcaaggacgtggtccagattaagtttgcacgaggacgaggacaaggaaaacgatggagactctttgccaacgtttaaatgtgtgtcaggacaaaatactaacacattatgaaaatgatagtacaaacctacgtgaccatatagactattggaaacacatgcgcctagaatgtgctatttattacaaggccagagaaatgggatttaaacatattaaccaccaggtggtgccaacactggctgtatcaaagaataaagcattacaagcaattgaactgcaactaacgttagaaacaatatataacccacaatatagtaatgaaaagtggacattacaagacgttagccttgaagtgtatttaactgcaccaacaggatgtataaaaaaacatggatatacagtggaagtgcagtttgatggagacatatgcaatacaatgcattatacaaactggaaacatatatatatttgtgaagaagcatcagtaactgtggtagagggtcaagttgactattatggtttatattatgttcatgaaggaatacaaacatattttgtgcagtttaaagatgatgcagaaaaatatagtaaaaataaagtatgggaagttcatgcgggtggtcaggtaatattatgtcctacatctgtgtttagcagcaacgaagtatcctctcctgaaactattaggcagcacttggccaaccactccgccgcgacccataccaaagccgtcgccttgggcaccaaagaaacacagacgactatccagcgaccaagatcagagccagacaccggagacccctgccacaccactaagttgctgcacagagactcagtggacagtactccaatcctcactgcatttaacagctcacacaaaggacggattaactgtaatagtaacactacacccatagtacatttaaaaggtgatgctaatactttaaaatgtttaagatatagatttaaaaagcattgtaaattgtatactgcagtgtcgtctacatggcattggacaggacataatgtaaaacataaaagtgcaattgttacacttacatatgatagtgaatggcaacgtgaacaatttttgtctcaagttaaaataccaaaaactattacagtgtctactggatttatgtctatatgacaaatcttgatactgcatccacaacattactggcgtgctttttgctttgcttttgtgtgcttttgtgtgtctgcctattaatacgtccgctgcttttgtctgtgtctacatacacatcattaatactattggtattactattgtggataacagcagcctctgcgtttaggtgttttattggatatattggatttgtttatataccattatttttaatacatactcatgcacgctttttaattacataatgtatatgtacataatgtaattgttacatataattgttgtataccataacttactattttttcttttttatttttatatataattttttgtttgtttgtgtgtttgttttttaataaactgttatcacttaacaatgcgacacaaacgttctgcaaaacgcacaaaacgtgcatcggctacccaactttataaaacatgcaaacaggcaggtacatgtccacctgacattatacctaaggttgaaggcaaaactattgctgatcaaatattacaatatggaagtatgggtgtattttttggtgggttaggaattggaacagggtcgggtacaggcggacgcactgggtatattccattgggaacaaggcctcccacagctacagatacacttgctcctgtaagaccccctttaacagtagatcctgtgggcccttctgatccttctatagtttctttcgtggaagaaactagttttattgatgctggtgcaccaacatctgtaccttccattcccccagatgtatcaggatttagtattactacttcaactgataccacacctgctatattagatattaataatactgttactactgttactacacataataatcccacttttactgacccatctgtattgcagcctccaacacctgcagaaactggagggcattttacactttcatcatccactattagtacacataattatgaagaaattcctatggatacatttattgttagcacaaaccctaacacagtaactagtagcacacccataccagggtctcgcccagtggcacgcctaggattatatagtcgcacaacacaacaagttaaagttgtagaccctgcttttgtaaccactcccactaaacttattacatatgataatcctgcatatgaaggtatagatgtggataatacattatattttcctaataatgataatagtattaatatagctccagatcctgactttttggatatagttgctttacataggccagcattaacctctaggcgtactggcattaggtacagtagaattggtaataaacaaacactacgtactcgtagtggaaaatctataggtgctaaggtacgttattattatgatttgagtactattgatcctgcagaagaaatagaattacaaactataacaccttctacatatactaccacttcacatgcagcctcacctacttctattaataatggattatatgatatttatgcagatgactttattacagatacttttacaactccggtaccatctgtaccctctacatctttatcaggttatattcctgcaaatacaacaattccttttggtggtgcatacaatattcctttagtatcaggtcctgatatacccattaatataactgaccaagctccttcattacttcctatagttccagggtctccacaatatacaattattgctgatgcaggtgacttttatttacatcctagttattacatgttacgaaaacgacgtaaacgtttaccatattttttttcagatgtctctttggctgcctagtgaggccactgtctacttgcctcctgtcccagtatctaaggttgtaagcacggatgaatatgttgcacgcacaaacatatattatcatgcaggaacatccagactacttgcagttggacatccctattttcctattaaaaaacctaacaataacaaaatattagttcctaaagtatcaggattacaatacagggtatttagaatacatttacctgaccccaataagtttggttttcctgacacctcattttataatccagatacacagcggctggtttgggcctgtgtaggtgttgaggtaggtcgtggtcagccattaggtgtgggcattagtggccatcctttattaaataaattggatgacacagaaaatgctagtgcttatgcagcaaatgcaggtgtggataatagagaatgtatatctatggattacaaacaaacacaattgtgtttaattggttgcaaaccacctataggggaacactggggcaaaggatccccatgtaccaatgttgcagtaactccaggtgattgtccaccattagagttaataaacacagttattcaggatggtgatatggttgatactggctttggtgctatggactttactacattacaggctaacaaaagtgaagttccactggatatttgtacatctatttgcaaatatccagattatattaaaatggtgtcagaaccatatggcgacagcttatttttttatttacgaagggaacaaatgtttgttagacatttatttaatagggctggtgctgttggtgaaaatgtaccagacgatttatacattaaaggctctgggtctactgcaaatttagccagttcaaattattttcctacacctagtggttctatggttacctctgatgcccaaatattcaataaaccttattggttacaacgagcacagggccacaataatggcatttgttggggtaaccaactatttgttactgttgttgatactacacgcagtacaaatatgtcattatgtgctgccatatctacttcagaaactacatataaaaatactaactttaaggagtacctacgacatggggaggaatatgatttacagtttatttttcaactgtgcaaaataaccttaactgcagacgttatgacatacatacattctatgaattccactattttggaggactggaattttggtctacaacctcccccaggaggcacactagaagatacttataggtttgtaacatcccaggcaattgcttgtcaaaaacatacacctccagcacctaaagaagatccccttaaaaaatacactttttgggaagtaaatttaaaggaaaagttttctgcagacctagatcagtttcctttaggacgcaaatttttactacaagcaggattaaaggccaaaccaaaatttacattaggaaaacgaaaagctacacccaccacctcatctacctctacaactgctaaacgcaaaaaacgtaagctgtaagtattgtatgtatgttgactcagtgttgtttgttgtttatatgtctgtatgtgcttgtatgtgcttgtaaatattaagttgtatgtgtgtttgtatgtatggtataataaacatgtgtgtatgtgtttttcactgcttgtgtaactattgtgtcatgcaacataaataaacttattgtttcaacacctactaattgtgttgtggttattcattgtatataaactatatttgctacatcctgtttttgttttatatatactatattttgtagcgccagcggccattttgtagcttcaaccgaattcggttgcatgctttttggcacaaaatgtgtttttttaaatagttctatgtcagcaactatagtttaaacttgtacgtttcctgcttgccatgcgtgccaaatccctgttttcctgacctgcactgcttgccaaccattccattgttttttacactgcactatgtgcaactactgaatcactatgtacattgtgtcatataaaataaatcactatgcgccaacgccttacataccgctgttaggcacatatttttggcttgttttaactaccctaattgcatatttggcataaggtttaaacttctaaggccaactaaatgccaccctagttcatacatgaactgtgtaaaggttagtcatacattgttcatttgtaaaactacacatgggtgtgtgcaaaccgttttgggttacacatttacaagcaacttatataataatactaaactacaataattcatgtataaaattaagggcgtaaccgaaatcggttgaaccgaaaccggttagtataaaagcagacattttatgcaccaaaagagaactgcaatgtttcaggacccacaggagcgacccagaaagttaccacagttatgcacagagctgcaaacaactatacatgagataatattagaatgtgtgtactgcaagcaacagttactgcgacgtgaggtatatgactttgcttttcgggatttatgcatagtatatagagatgggaatccatatgctgtatgtgataaatgtttaaagttttattctaaaattagtgagtatagacattattgttatagtttgtatggaacaacattagaacagcaatacaacaaaccgttgtgtgatttgttaattaggtgtattaactgtcaaaagccactgtgtcctgaagaaaagcaaagacatctggacaaaaagcaaagattccataatataaggggtcggtggaccggtcgatgtatgtcttgttgcagatcatcaagaacacgtagagaaacccagctgtaatcatgcatggagatacacctacattgcatgaatatatgttagatttgcaaccagagacaactgatctctactgttatgagcaattaagtgacagctcagaggaggaggatgaaatagatggtccagctggacaagcagaaccggacagagcccattacaatattgtaaccttttgttgcaagtgtgactctacgcttcggttgtgcgtacaaagcacacacgtagacattcgtactttggaagacctgttaatgggcacactaggaattgtgtgccccatctgttcccagaaaccataatctacc

SEQ ID NO: 111 - DNA, 7906 bp, Human papillomavirus
  source 1..7906: mol_type = genomic DNA; note = sublineage B1; serotype = HPV16
atggctgatcctgcaggtaccaatggggaagagggtacgggatgtaatggatggttttatgtagaggctgtagtggaaaaaaaaacaggggatgctatatcagatgacgagaacgaaaatgacagtgatacaggtgaagatttggtagattttatagtaaatgataatgattatttaacacaggcagaaacagagacagcacatgcgttgtttactgcacaggaagcaaaagaacatagagatgcagtacaggttctaaaacgaaagtatttgggtagtccacttagtgatattagtggatgtgtagacaataatattagtcctagattaaaggctatatgtatagaaaaacaaagtagagctgcaaaaaggagattatttgaaagcgaagacagcgggtatggcaatactgaagtggaaactcagcagatgttacaggtagaagggcgccatgagactgaaacaccatgtagtcagtatagtggtggaagtgggggtggtagcagtcagtatagtagtggaagtgggggagagggtgttagtgaaagacacactatatgccaaacaccacttacaaatattttaaatgtactaaaaactagtaatgcaaaggcagcaatgctagcaaaatttaaagagttatacggggtgagtttttcagaattagtaagaccatttaaaagtaataaatcaacgtgttgcgattggtgtattgctgcatttggacttacacctagtatagctgacagtataaaaacattattacaacaatattgtttatatttacacattcaaagtttagcatgttcatggggaatggttgtgttactattagtaagatataaatgtggaaaaaatagagaaacaattgaaaaattgttgtctaaactattatgtgtgtctccaatgtgtatgatgatagagcctccaaaattgcgtagtacagcagcagcattatattggtataaaacaggtatgtcaaatattagtgaagtgtatggagacacgccagaatggatacaaagacaaacagtattacaacatagttttaatgattgtacatttgaattatcacagatggtacaatgggcctacgataatgacatagtagacgatagtgaaattgcatataaatatgcacaattggcagacactaatagtaatgcaagtgcctttttaaaaagtaattcacaggcaaaaattgtaaaggattgtgcaacaatgtgtagacattataaacgagcagaaaaaaaacaaatgagtatgagtcaatggataaaatatagatgtgatagggtagatgatggaggtgattggaagcaaattgttatgtttttaaggtatcaaggtgtagactttatgtcatttttaactgcgttaaaaagatttttgcaaggcatacctaaaaaaaattgcatattactatatggtgcagctaacacaggtaaatcattatttggtatgagtttgatgaaatttttgcaagggtctgtaatatgttttgtaaattctaaaagccatttttggttacaaccattagcagatgccaaaataggtatgttagatgatgctacagtgccctgttggaactacatagatgacaatttaagaaatgcattggatggaaatttagtttctatggatgtaaagcatagaccattggtacaactaaaatgccctccattattaattacatctaacattaatgctggtacagattccaggtggccttatttacataatagattggtggtgtttacatttccaaatgagtttccatttgacgaaaacggaaatccagtgtatgagcttaatgataagaactggaaatcctttttctcaaggacgtggtccagattaagtttgcacgaggacgaggacaaggaaaacgatggggactctttgccaacgtttaaatgtgtgtcaggacaaaatactaacacattatgaaaatgatagtacagacctacgtgaccatatagactattggaaacaaatgcgcctagaatgtgctatttattacaaggccagagaaatgggatttaaacatattaaccaccaggtggtgccaacactgactgtatcaaagaataaagcattacaagcaattgaactgcaactaacgttagaaacaatatataactcacaatatagtaatgaaaagtggacattacaagacgttagccttgaagtgtatttaactgcaccaacaggatgtataaaaaaacatggatatacagtggaagtgcagtttgatggagacatatgcaatacaatgcgttatacaaactggaaatatatatatatttgtgaagacatatcagtaactgtggtagagggtcaagttgactattatggtttatactatgtccatgaaggaatacaaacatattttgtgcagtttaaagatgatgcagaaaaatatagtaaaaataaagtatgggaagttcatgcgggtggtcaggtaatattatgtcctacatctgtgtttagcagcgacgaagtatcctctgctgaaattattaggcagcacttggccaaccactccgccgcgacccatcccaaagccgtcgccttgggcaccaaagaaacacagacgactatccagcgaccaagatcagagccagacaccggaaacccctgccacaccaataagttgttgcacagagactcagtggacagtgctccaatcctcactgcagttaacagctcacacaaaggacggattaactgtaatagtaacactacacccatagtacatttaaaaggtgatgctaatactttaaaatgtttaagatacagatttaaaaagcattgtaaattgtatacagcagtgtcgtctacatggcattggacaggacataatgtaaaacataaaagtgcaattgttacacttacatatgatagtgaatgtcaacgggaacaatttttgtctcaggttaaaataccaaaaactattacagtgtctactggatttatgtctatatgacaaaccttgatactacatccacaacattactggcgtgctttttgctttgcttttgtgtgcttttgtgtgtctgcctattaatacgtccgctgcttttgtctgtgtctacatacacatcattaatactattggtattattattgtggataacagcagcctctgcgtttaggtgttttattgtatatattttatttgtttatataccattatttttaatacatacacatgcacgcttcttaattacataatgtatatgtacataatgtaattgttacatataattgctgtatatcataacttactgattttttttttttatttttatatatatagtttttttttatttgtttgtttgtttttcaataaactgttattacttaacaatgcgacacaaacgttctgcaaaacgcacaaaacgtgcatcggccacccaactttataaaacatgcaaacaagcaggtacatgtccacctgacattatacctaaggttgaaggcaaaactattgctgatcaaatattacaatatggaagtatgggtgtattttttggtgggttaggaattggaacagggtcaggtacaggcggacgcactgggtatattccattaggaacaaggcctcccacagctacagatacacttgctcctgtaagaccccctttaacagtagatcctgtgggcccttctgatccttctatagtttctttagtggaagaaactagttttattgatgctggtgcaccaacacctgtaccttccattcccccagatgtatcaggatttagtattacaacttcaactgataccacacctgctatattagatattaataatactgttactactgttactacacataataatcccacttttactgacccatctgtattgcagcctccaacacctgcagaaactggagggcattttacactttcatcatccactattagtacacataattatgaagaaattcctatggatacatttattgttagcacaaaccctaacacagtaactagtagcacacccataccagggtctcgcccagtggcacgccttggattatatagtcgcacaacacaacaagttaaagttgtagaccctgcttttgtaaccactcccactaaacttattacatatgataatcctgcatatgaaggtatagatgtggataatacattatattttcctagtaatgataatagtattaatatagctccagatcctgactttttggatatagttgctttacataggccagcattaacctctaggcgtactggcattagatacagtagaattggtaataaacaaacactacgtactcgtagtggaaaatctataggtgctaaggtacattattattatgatttaagtactattaatcctgcagaagaaatagaattacaaactataacaccttctacatatactaccgcttcacatgcagcctcacccacttctattaataatggattatatgatatttatgcagatgactttattacagatacttctacaaccccagtaccatctataccctctacatccttatcaggttatattcctgcaaatacaacaattccttttggtggtgcatacaatattcctttagtatcaggtcctgatatacccattaatacaactgaccaaactccttcattaattcctatagttccagggtctccacaatatacaattattgctgatggaggtgacttttatttacatcctagttattacatgttacgaaaacgacgtaaacgtttaccatattttttttcagatgtctctttggctgcctagcgaggccactgtctacttgcctcctgtcccagtatctaaagttgtaagcacggatgaatatgttgcacgcacaaacatatattatcatgcaggaacatccagactacttgcagttggacatccctattttcctattaaaaaacctaacaataacaaaatattagttcctaaagtatcaggattacaatacagggtatttagaatatatttacctgaccccaataagtttggtcttcctgacacctcattttacaatccagatacacagcggctggtttgggcctgtgtaggtgttgaggtaggtcgtggtcagccattaggtgtgggcattagtggccatcctttattaaataaattggatgacacagaaaatgctagtgcttatgcagcaaatgcaggtgtggataatagggaatgtatatctatggattacaaacaaacacaattgtgtttaattggttgcaaaccacctataggggaacactggggcaaaggatccccatgtaacaatgttgcagtaaatccaggtgattgtccaccattagagttaataaacacagttattcaggatggtgatatggttgataccggctttggtgctatggactttactacattacaggctaacaaaagtgaagttccactggatatttgtacgtctatttgcaaatatccagattatattaaaatggtgtcagaaccatatggcgacagcttatttttttatttacgaagggaacaaatgtttgttagacatttatttaatagggctggtgctgttggtgaaaatgtaccagacgatttatacattaaaggctctgggtctactgcaaatttagccagttcaaattattttcctacacctagtggttctatggttacctctgatgcccaaatatttaataaaccatattggttgcaacgagcacagggccacaataatggcatttgttggggtaaccaactatttgttactgttgttgatactacacgcagtacaaatatgtcattatgtgctgccatatctacttcagaaactacatataaaaatactaactttaaagagtacctacgacatggggaggaatatgatttacagtttatttttcaactgtgcaaaataaccttaactgcagacgttatgacatacatacattctatgaattccactattttggaggactggaattttggtttacaacctcccccaggaggcacactagaagatacttataggtttgtaacatcccaggcaattgcttgtcaaaaacatacacctccagcacctaaagaagatccccttaaaaaatatactttttgggaagtaaatttaaaagaaaagttttctgcagacctagatcagtttcctttaggacgcaaatttttactacaagcaggatttaaggctaaaccaaaatttacattagggaaacgaaaagctacacccaccacctcatctacctctacaactgctaaacgcaaaaaacgtaagctgtaagtattgtatgtatgttgaattagtgttgtttgttgtttatatgcttgtatgtgcttgtatgtgcttgtaaatattgagttgtatgtgtgtttgtatgtatggtataataaacacgtgtgtatgtgtttttaaatgcttgtgtaactattgtgtcatgcaacataaataaacttattgtttcaacacctactaattgtgttgtggttattcattgtatataaactatatttgctacatcctgtttttgttttatatatactatattttgtagcgccagcggccattttgtagcttcaaccgaattcggttgcatgctttttggcacaaaatgtatttttttaaatagttctatgtcagcaactatagtttaaacttgtacgtttcctgcttgccatgcgtgccaaatccctgttttcctgacctgcactgcttgccaaccattccattgttttttacactgcactatgtgcaactactgaatcactatgtacattgtgtcatataaaataaatcactatgcgccaacgccttaaataccgctgttaggcacatatttttggcttgttttaactaacctaattgcatatttggcataaggtttaaacttttaaggccaactaaatgtcaccttagttcatacatgaactgtgtaaaggttagtcatacattgttcatttttaaaactgcacatgggtgtgtgcaaaccgttttgggttacaaatttacaagcaacttatataataatactaaactacaataattcatgtataaaactaagggtgtaaccgaaatcggttgaaccgaaaccggttagtataaaagcagacattttctgcaccaaaagagaactgcaatgtttcaggacccacaggagcgacccacaaagttaccagatttatgcacagagctgcaaacaactatacatgatataatattagaatgtgtgtactgcaagcaacagttactgcgacgtgaggtatatgactttgcttttcgggatttatgcatagtatatagagatgggaatccatatgcagtgtgtgataaatgtttaaagttttattctaaaattagtgagtatagatattattgttatagtttgtatggaacaacattagaacagcaatacaacaaaccgttgtgtgatttgttaattaggtgtattaactgtcaaaagccactgtgtcctgaagaaaagcaaagacatctggacaaaaagcaaagattccataatataaggggtcggtggaccggtcgatgtatgtcttgttgcagatcatcaagaacacgtagagaaacccagctgtaatcatgcatggagatacacctacattgcatgaatatatgttagatttgcaaccagagacaactgatctctactgttatgagcaattaaatgacagctcagaggaggaggatgaaatagatggtccagctggacaagcagaaccggacagagcccattacaatattgtaaccttttgttgcaagtgtgactctacgcttcggttgtgcgtacaaagcacacacgtagacatccgtacgttggaagacctgttaatgggcacactaggaattgtgtgccccatctgttctcagaaaccataatctacc

SEQ ID NO: 112 - DNA, 7912 bp, Human papillomavirus
  source 1..7912: mol_type = genomic DNA; note = sublineage B2; serotype = HPV16
atggctgatcctgcaggtaccaatggggaagagggtacgggatgtaatggatggttttatgtagaggctgtagtggaaaaaaaaacaggggatgctgtatcagatgacgagaacgaaaatgacagtgatacaggtgaagatttggtagattttatagtaaatgataatgattatttaacacaggcagaaacagagacagcacatgcgttgtttactgcacaggaagcaaaagaacatagagatgcagtacaggttctaaaacgaaagtatttgggtagtccacttagtgatattagtggatgtgtagacaataatattagtcctagattaaaagctatatgtatagaaaaacaaagtagagctgcaaaaaggagattatttgaaagcgaagacagcgggtatggcaatactgaagtggaaactcagcagatgttacaggtagaagggcgccatgagactgaaacaccatgtagtcagtatagtggtggaagtgggggtggtagcagtcagtatagtagtggaagtgggggagagggtgttagtgaaagacacactatatgcgaaacaccacttacaaatattttaaatgtactaaaaactagtaatgcaaaggcagcaatgctagcaaaatttaaagagttatacggggtgagtttttcagaattagtaagaccatttaaaagtaataaatcaacgtgttgcgattggtgtattgctgcatttggacttacacccagtatagctgacagtataaaaacattattacaacaatattgtttatatttacacattcaaagtttagcatgttcatggggaatggttgtgttactattagtaagatataaatgtggaaaaaatagagaaacaattgaaaaattgctgtctaaactattatgtgtgtctccaatgtgtatgatgatagagcctccaaaattgcgtagtacagcagcagcattatattggtataaaacaggtatgtcaaatattagtgaagtgtatggagacacgccagaatggatacaaagacaaacagtattacaacatagttttaatgattgtacatttgaattatcacagatggtacaatgggcctacgataatgacatagtagacgatagtgaaattgcatataaatatgcacaattggcagacactaatagtaatgcaagtgcctttttaaaaagtaattcacaggcaaaaattgtaaaggattgtgcaacaatgtgtagacattataaacgagcagaaaaaaaacaaatgagtatgagtcaatggataaaatatagatgtgatagggtagatgatggaggtgattggaagcaaattgttatgtttttaaggtatcaaggtgtagactttatgtcatttctaactgcattaaaaagatttttgcaaggcatacctaaaaaaaattgcatattactatatggtgcagctaacacaggtaaatcattatttggtatgagtttaatgaaatttttgcaagggtctgtaatatgttttgtaaattctaaaagccatttttggttacaaccattagcagatgccaaaataggtatgttagatgatgctacagtgccctgttggaactacatagatgacaatttaagaaatgcattggatggaaatttagtttctatggatgtaaagcatagaccattggtacaactaaaatgccctccattattgattacatctaacattaatgctggtacagattccaggtggccttatttacataatcgattggtggtgtttacatttccaaatgagtttccatttgatgaaaacggaaatccagtgtatgagcttaatgataagaactggaaatcctttttctcaaggacgtggtccagattaagtttgcacgaggacgaggacaaggaaaacgatggagactctttgccaacgtttaaatgtgtgtcaggacaaaatactaacacattatgaaaatgatagtacagacctacgtgaccatatagactattggaaacaaatgcgcctagaatgtgctatttattacaaggccagagaaatgggatttaaacatattaaccaccaggtggtgccaacactggctgtatcaaagaataaagcattacaagcaattgaactgcaactaacgttagaaacaatatataactcacaatatagtaatgaaaagtggacattacaagacgttagccttgaagtgtatttaactgcaccaacaggatgcataaaaaaacatggatatacagtggaagtgcagtttgatggagacatatgcaatacaatgcattatacaaactggaaatatatatatatttgtgaagacacatcagtaactgtggtagagggtcaagttgactattatggtttatattatgttcatgaaggaatacaaacatattatgtgcagtttaaagatgatgcagaaaaatatagtaaaaataaagtatgggaagttcatgcgggtggtcaggtaatattatgtcctacatctgtgtttagcagcgacgaagtatcctctgctgaaattactaggcagcacttggccaaccactccgccgcgacccataccaaagccgtcgccttgggcaccaaagaaacacagacgactatccagcgaccaagatcagagccagacaccggaaacccctgccacaccaataagttgttgcacagagactcagtggacagtgctccaatcctcactgcagttaacagctcacacaaaggacggattaactgtaatagtaacactacacccatagtacatttaaaaggtgatgctaatactttaaaatgtttaagatatagatttaaaaagcattgtaaattgtatacagcagtgtcgtctacatggcattggacaggacataatgtaaaacataaaagtgcaattgttacacttacatatgatagtgaatgtcaacgtgaacaatttttgtctcaagtcaaaataccaaaaactattacagtgtctactggatttatgtctatatgacaaaccttgatactacatccacaacattactggcgtgctttttgctttgcttttgtgtgcttttgtgtgtctgcctattaatacgtccgctgcttttgtctgtgtctacatacacatcattaatactattggtattattattgtggataacagcagcctctgcgtttaggtgttttattgtatatattttatttgtttatataccattgtttttaatacatacacatgcacgcttcgtaattacataatgtatatgtacataatgtaattgttacatataattgttgtatatcataacttactgattttttttttatttttatatatatagtttttttttatttgtttgtttgtttgtttgttttttaataaactgttattacttaacaatgcgacacaaacgttctgcaaaacgcacaaaacgtgcatcggccacccaactttataaaacatgcaaacaagcaggtacatgtccacctgacattatacctaaggttgaaggcaaaactattgctgatcaaatattacaatatggaagtatgggtgtattttttggtgggttaggaattggaacagggtcaggtacaggcggacgcactgggtatattccattaggaacaaggcctcccacagctacagatacacttgctcctgtaagaccccctttaacagtagatcctgtgggcccttctgatccttctatagtgtctttagtggaagaaactagttttattgatgctggtgcaccaacacctgtaccttccattcccccagatgtatcaggatttagtattacaacttcaactgataccacacctgctatattagatattaataatactgttactactgttactacacataataatcccacttttactgacccatctgtattgcagcctccaacacctgcagaaactggagggcattttacactttcatcatccactattagtacacataattatgaagaaattcctatggatacatttattgttagcacaaaccctaacacagtaactagtagcacacccataccagggtctcgcccagtggcacgccttggattatatagtcgcacaacacaacaagttaaagttgtagaccctgcttttgtaaccactcccactaaacttattacatatgataatcctgcatatgaaggtatagatgtggataatacattatattttcctagtaatgataatagtattaatatagctccagatcctgactttttggatatagttgctttacataggccagcattaacctctaggcgtactggcattagatacagtagaattggtaataaacaaacactacgtactcgtagtggaaaatctataggtgctaaggtacattattattatgatttaagtactattaatgctgcagaagaaatagaattacaaactataacaccttctacatatactaccgcttcacatgcagcctcacccacttctattaataatggattatatgatatttatgcagatgactttattacagatacttctacaaccccagtaccatctataccctctacatccttatcaggttatattcctgcaaatacaacaattccttttggtggtgcatacaatattcctttagtatcaggtcctgatatacccattaatacaactgaccaaactccttcattaattcctatagttccagggtctccacaatatacaattattgctgatggaggtgacttttatttacatcctagttattacatgttacgaaaacgacgtaaacgtttaccatattttttttcagatgtctctttggctgcctagcgaggccactgtctacttgcctcctgtcccagtatctaaagttgtaagcacggatgaatatgttgcacgcacaaacatatattatcatgcaggaacatccagactacttgcagttggacatccctattttcctattaaaaaacctaacaataacaaaatattagttcctaaagtatcaggattacaatacagggtatttagaatatatttacctgaccccaataagtttggttttcctgacacctcattttacaatccagatacacagcggctggtttgggcctgtgtaggtgttgaggtaggtcgtggtcagccattaggtgtgggcattagtggccatcctttattaaataaattggatgacacagaaaatgctagtgcttatgcagcaaatgcaggtgtggataatagagaatgtatatctatggattacaaacaaacacaattgtgtttaattggttgcaaaccacctataggggaacactggggcaaaggatccccatgtaacaatgttgcagtaaatgcaggtgattgtccaccattagagttaataaacacagttattcaggatggtgatatggttgataccggctttggtgctatggactttactacattacaggctaacaaaagtgaagttccactggatatttgtacgtctatttgcaaatatccagattatattaaaatggtgtcagaaccatatggcgacagcttatttttttatttacgaagggaacaaatgtttgttagacatttatttaatagggctggtgctgttggtgaaaatgtaccagacgatttatacattaaaggctctgggtctactgcaactttagccagttcaaattattttcctacacctagtggttctatggttacctctgatgcccaaatatttaataaaccatattggttacaacgagcacagggccacaataatggcatttgttggggtaaccaactatttgttactgttgttgatactacacgcagtacaaatatgtcattatgtgctgccatatctacttcagaaactacatataaaaatactaactttaaagagtacctacgacatggggaggaatatgatttacagtttatttttcaactgtgcaaaataaccttaactgcagacgttatgacatacatacattctatgaattccactattttggaggactggaattttggtttacaacctcccccaggaggcacactagaagatacttataggtttgtaacatcccaggcaattgcttgtcaaaaacatacacctccagcacctaaagaagatccccttaaaaaatatactttttgggaagtaaatttaaaagaaaagttttctgcagacctagatcagtttcctttaggacgcaaatttttactacaagcaggatttaaggccaaaccaaaatttacattaggaaaacgaaaagctacacccaccacctcatctacctctacaactgctaaacgcaaaaaacgtaagctgtaagtattgtatgtatgttgaattagtgttgtttgttgtgtatatgtttgtatgtgcttgtatgtgcttgtaaatattaagttgtatgtgtgtttgtatgtatggtataataaacacgtgtgtatgtgtttttaaatgcttgtgtaactattgtgtcatgcaacataaataaacttattgtttcaacacctactaattgtgttgtggttattcattgtatataaactatatttgctacatcctgtttttgttttatatatactatattttgtagcgccagcggccattttgtaacttcaaccgaattcggttgcatgctttttggcacaaaatgtatttttttaaatagttctatgtcagcaactatagtttaaacttgtacgtttcctgcttgccatgcgtgccaaatccctgttttcctgacctgcactgcttgccaaccattccattgttttttacactgcactatgtgcaactactgaatcactatgtacattgtgtcatataaaataaatcactatgcgccaacgccttaaataccgctgttaggcacatatttttggcttgttttaactaacctaattgcatatttggcataaggtttaaacttttaaagccaactaaatgtcaccttagttcatacatgaactgtgtaaaggttagtcatacattgttcatttttaaaactgcacatgggtgtgtgcaaaccgttttgggttacaaatttacaagcaacttatataataatactaaactacaataattcatgtataaaactaagggtgtaaccgaaatcggttgaaccgaaaccggttagtataaaagcagacattttatgcaccaaaagagaactgcaatgtttcaggacccacaggagcgacccggaaagttaccagatttatgcacagagctgcaaacaactatacatgatataatattagaatgtgtgtactgcaagcaacagttactgcgacgtgaggtatatgactttgcttttcgggatttatgcatagtatatagagatgggaatccatatgcagtgtgtgataaatgtttaaagttttattctaaaattagtgagtatagatattattgttatagtttgtatggaacaacattagaacagcaatacaacaaaccgttgtgtgatttgttaattaggtgtattaactgtcaaaagccactgtgtcctgaagaaaagcaaagacatctggacaaaaagcaaagattccataatataaggggtcggtggaccggtcgatgtatgtcttgttgcagatcatcaagaacacgtagagaaacccagctgtaatcatgcatggagatacacctacattgcatgaatatatgttagatttgcaaccagagacaactgatctctactgttatgagcaattaaatgacagctcagaggaggaggatgaaatagatggtccagctggacaagcagaaccggacagagcccattacaatattgtaaccttttgttgcaagtgtgactctacgcttcggttgtgcgtacaaagcacacacgtagacatccgtacgttggaagacctgttaatgggcacactaggaattgtgtgccccatctgttctcagaaaccataatctacc

SEQ ID NO: 113 - DNA, 7909 bp, Human papillomavirus
  source 1..7909: mol_type = genomic DNA; note = sublineage B3; serotype = HPV16
atggctgatcctgcaggtaccaatggggaagagggtacgggatgtaatggatggttttatgtagaggctgtagtggaaaaaaaaacaggggatgctgtatcaaatgacgagaacgaaaatgacagtgatacaggtgaagatttggtagattttatagtaaatgataatgattatttaacacaggcagaaacagagacagcacatgcgttgtttactgcacaggaagcaaaagaacatagagatgcagtacaggttctaaaacgaaagtatttgggtagtccacttagtgatattagtggatgtgtagacaataatattagtcctagattaaaagctatatgtatagaaaaacaaagtagagctgcaaaaaggagattatttgaaagcgaagacagcgggtatggcaatactgaagtggaaactcagcagatgttacaggtagaagggcgccatgagactgaaacaccatgtagtcagtatagtggtggaagtgggggtggtagcagtcagtatagtagtggaagtgggggagagggtgttagtgaaagacacactatatgcgaaacaccacttacaaatattttaaatgtactaaaaactagtaatgcaaaggcagcaatgctagcaaaatttaaagagttatacggggtgagtttttcagaattagtaagaccatttaaaagtaataaatcaacgtgttgcgattggtgtattgctgcatttggacttacacccagtatagctgacagtataaaaacattattacaacaatattgtttatatttacacattcaaagtttagcatgttcatggggaatggttgtgttactattagtaagatataaatgtggaaaaaatagagaaacaattgaaaaattgctgtctaaactattatgtgtgtctccaatgtgtatgatgatagagcctccaaaattgcgtagtacagcagcagcattatattggtataaaacaggtatgtcaaatattagtgaagtgtatggagacacgccagaatggatacaaagacaaacagtattacaacatagttttaatgattgtacatttgaattatcacagatggtacaatgggcctacgataatgacatagtagacgatagtgaaattgcatataaatatgcacaattggcagacactaatagtaatgcaagtgcctttttaaaaagtaattcacaggcaaaaattgtaaaggattgtgcaacaatgtgtagacattataaacgagcagaaaaaaaacaaatgagtatgagtcaatggataaaatatagatgtgatagggtagatgatggaggtgattggaagcaaattgttatgtttttaaggtatcaaggtgtagactttatgtcatttctaactgcattaaaaagatttttgcaaggcatacctaaaaaaaattgcatattactatatggtgcagctaacacaggtaaatcattatttggtatgagtttaatgaaatttttgcaagggtctgtaatatgttttgtaaattctaaaagccatttttggttacaaccattagcagatgccaaaataggtatgttagatgatgctacagtgccctgttggaactacatagatgacaatttaagaaatgcattggatggaaatttagtttctatggatgtaaagcatagaccattggtacaactaaaatgccctccattattaattacatctaacattaatgctggtacagattccaggtggccttatttacataatcgattggtggtgtttacatttccaaatgagtttccatttgatgaaaacggaaatccagtgtatgagcttaatgataagaactggaaatcctttttctcaaggacgtggtccagattaagtttgcacgaggacgaggacaaggaaaacgatggagactctttgccaacgtttaaatgtgtgtcaggacaaaatactaacacattatgaaaatgatagtacagacctacgtgaccatatagactattggaaacaaatgcgcctagaatgtgctatttattacaaggccagagaaatgggatttaaacatattaaccaccaggtggtgccaacactggctgtatcaaagaataaagcattacaagcaattgaactgcaactaacgttagaaacaatatataactcacaatatagtaatgaaaagtggacattacaagacgttagccttgaagtgtatttaactgcaccaacaggatgcataaaaaaacatggatatacagtggaagtgcagtttgatggagacatatgcaatacaatgcattatacaaactggaaatatatatatatttgtgaagaaacatcagtaactgtggtagagggtcaagttgactattatggtttatattatgttcatgaaggaatacaaacatattttgtgcagtttaaagatgatgcagaaaaatatagtaaaaataaagtatgggaagttcatgcgggtggtcaggtaatattatgtcctacatctgtgtttagcagcgacgaagtatcctctgctgaaattattaggcagcacttggccaaccactccgccgcgacccataccaaagccgtcgccttgggcaccaaagaaacacagacgactatccagcgaccaagatcagagccagacaccggaaacccctgccacaccaataagttgttgcacagagactcagtggacagtgctccaatcctcactgcagttaacagctcacacaaaggacggattaactgtaatagtaacactacacccatagtacatttaaaaggtgatgctaatactttaaaatgtttaagatatagatttaaaaagcattgtaaattgtatacagcagtgtcgtctacatggcattggacaggacataatgtaaaacataaaagtgcaattgttacacttacatatgatagtgaatgtcaacgtgaacaatttttgtctcaagtcaaaataccaaaaactattacagtgtctactggatttatgtctatatgacaaaccttgatactacatccacaacattactggcgtgctttttgctttgcttttgtgtgcttttgtgtgtctgcctattaatacgtccgctgcttttgtctgtgtctacatacacatcattaatactattggtattattattgtggataacagcagcctctgcgtttaggtgttttattgtatatattttatttgtttatataccattatttttaatacatacacatgcacgcttcttaattacataatatatatgtacataatgtaattgttacatataattgttgtatatcataacttactgattttttttttttatttttatatatatagtttttttttattgtttgtttgtttgttttttaataaactgttattacttaacaatgcgacacaaacgttctgcaaaacgcacaaaacgtgcatcggccacccaactttataaaacatgcaaacaagcaggtacatgtccacctgacattatacctaaggttgaaggcaaaactattgctgatcaaatattacaatatggaagtatgggtgtattttttggtgggttaggaattggaacagggtcaggtacaggcggacgcactgggtatattccattaggaacaaggcctcccacagctacagatacacttgctcctgtaagaccccctttaacagtagatcctgtgggcccttctgatccttctatagtgtctttagtggaagaaactagttttattgatgctggtgcaccaacacctgtaccttccattcccccagatgtatcaggatttagtattacaacttcaactgataccacacctgctatattagatattaataatactgttactactgttactacacatgataatcccacttttactgacccatctgtattgcagcctccaacacctgcagaaactggagggcattttacactttcatcatccactattagtacacataattatgaagaaattcctatggatacatttattgttagcacaaaccctaacacagtaactagtagcacacccataccagggtctcgcccagtggcacgccttggattatatagtcgcacaacacaacaagttaaagttgtagaccctgcttttgtaaccactcccactaaacttattacatatgataatcctgcatatgaaggtatagatgtggataatacattatattttcctagtaatgataatagtattaatatagctccagatcctgactttttggatatagttgctttacataggccagcattaacctctaggcgtactggcattagatacagtagaattggtaataaacaaacactacgtactcgtagtggaaaatctataggtgctaaggtacattattattatgatttaagtactattaatcctgcagaagaaatagaattacaaactataacaccttctacatatactaccacttcacatgcagcctcacccacttctattaataatggattatatgatatttatgcagatgactttattacagatacttctacaaccccagtaccatctataccctctacatccttatcaggttatattcctgcaaatacaacaattccttttggtggtgcatacaatattcctttagtatcaggtcctgatatacccattaatacaactgaccaaactccttcattacttcctatagttccagggtctccacaatatacaattattgctgatggaggtgacttttatttacatcctagttattacatgttacgaaaacgacgtaaacgtttaccatattttttttcagatgtctctttggctgcctagcgaggccactgtctacttgcctcctgtcccagtatctaaagttgtaagcacggatgaatatgttgcacgcacaaacatatattatcatgcaggaacatccagactacttgcagttggacatccctattttcctattaaaaaacctaacaataacaaaatattagttcctaaagtatcaggattacaatacagggtatttagaatatatttacctgaccccaataagtttggttttcctgacacctcattttacaatccagatacacagcggctggtttgggcctgtgtaggtgttgaggtaggtcgtggtcagccattaggtgtgggcattagtggccatcctttattaaataaattggatgacacagaaaatgctagtgcttatgcagcaaatgcaggtgtggataatagagaatgtatatctatggattacaaacaaacacaattgtgtttaattggttgcaaaccacctataggggaacactggggcaaaggatccccatgtaacaatggtgcagtaaatccaggtgattgtccaccattagagttaataaacacagttattcaggatggtgatatggttgataccggctttggtgctatggactttactacattacaggctaacaaaagtgaagttccactggatatttgtacgtctatttgcaaatatccagattatattaaaatggtgtcagaaccatatggcgacagcttatttttttatttacgaagggaacaaatgtttgttagacatttatttaatagggctggtactgttggtgaaaatgtaccagacgatttatacattaaaggctctgggtctactgcaactttagccagttcaaattattttcctacacctagtggttctatggttacctctgatgcccaaatatttaataaaccatattggttacaacgagcacagggccacaataatggcatttgttggggtaaccaactatttgttactgttgttgatactacacgcagtacaaatatgtcattatgtgctgccatatcaacttcagaaactacatataaaaatactaactttaaagagtacctacgacatggggaggaatatgatttacagtttatttttcaactgtgcaaaataaccttaactgcagacgttatgacatacatacattctatgaattccactattttggaggactggaattttggtttacaacctcccccaggaggcacactagaagatacttataggtttgtaacatcccaggcaattgcttgtcaaaaacatacacctccagcacctaaagaagatccccttaaaaaatatactttttgggaagtaaatttaaaagaaaagttttctgcagacctagatcagtttcctttaggacgcaaatttttactacaagcaggatttaaggccaaaccaaaatttacattaggaaaacgaaaagctacacccaccacctcatctacctctacaactgctaaacgcaaaaaacgtaagctgtaagtattgtatgtatgttgaattagtgttgtttgttgtgtatatgtttgtatgtgcttgtatgtgcttgtaaatattgagttgtatgtgtgtttgtatgtatggtataataaacacgtgtgtatgtgtttttaaatgcttgtgtaactattgtgtcatgcaacataaataaacatattgtttcaacacctactaattgtgttgtggttattcattgtatataaactatatttgctacatcctgtttttgttttatatatactatattttgtagcgccagcggccattttgtaacttcaaccgaattcggttgcatgctttttggcacaaaatgtatttttttaaatagttctatgtcagcaactatagtttaaacttgtacgtttcctgcttgccatgcgtgccaaatccctgttttcctgacctgcactgcttgccaaccattccattgttttttacactgcactatgtgcaactactgaatcactatgtacattgtgtcatataaaataaatcactatgcgccaacgccttaaataccgctgttaggcacatatttttggcttgttttaactaacctaattgcatatttggcataaggtttaaacttttaaagccaactaaatgtcaccttagttcatacatgaactgtgtaaaggttagtcatacattgttcatttttaaaactgcacatgggtgtgtgcaaaccgttttgggttacaaatttacaagcaacttatataataatactaaactacaataattcatgtataaaactaagggtgtaaccgaaatcggttgaaccgaaaccggttagtataaaagcagacattttatgcaccaaaagagaactgcaatgtttcaggacccacaggagcgacccggaaagttaccagatttatgcacagagctgcaaacaactatacatgatataatattagaatgtgtgtactgcaagcaacagttactgcgacgtgaggtatatgactttgcttttcgggatttatgcatagtatatagagatgggaatccatatgcagtgtgtgataaatgtttaaagttttattctaaaattagtgagtatagatattattgttatagtttgtatggaacaacattagaacagcaatacaacaaaccgttgtgtgatttgttaattaggtgtattaactgtcaaaagccactgtgtcctgaagaaaagcaaagacatctggacaaaaagcaaagattccataatataaggggtcggtggaccggtcgatgtatgtcttgttgcagatcatcaagaacacgtagagaaacccagctgtaatcatgcatggagatacacctacattgcatgaatatatgttagatttgcaaccagagacaactgatctctactgttatgagcaattaagtgacagctcagaggaggaggatgaaatagatggtccagctggacaagcagaaccggacagagcccattacaatattgtaaccttttgttgcaagtgtgactctacgcttcggttgtgcgtacaaagcacacacgtagacatccgtacgttggaagacctgttaatgggcacactaggaattgtgtgccccatctgttctcagaaaccataatctacc

SEQ ID NO: 114 - DNA, 7907 bp, Human papillomavirus
  source 1..7907: mol_type = genomic DNA; note = sublineage B4; serotype = HPV16
atggctgatcctgcaggtaccaatggggaagagggtacgggatgtaatggatggttttatgtagaggctgtagtggaaaaaaaaacaggggatgctatatcagatgacgagaacgaaaatgacagtgatacaggtgaagatttggtagatttcatagtaaatgataatgattatttaacacaggcagaaacagagacagcacatgcgttgtttactgcacaggaagcaaaagaacatacagatgcagtacaggttctaaaacgaaagtatttgggtagtccacttagtgatattagtggatgtgtagacaataatattagtcctagattaaaagctatatgtatagaaaaacaaagtagagctgcaaaaaggagattatttgaaagcgaagacagcgggtatggcaatactgaagtggaaactcagcagatgttacaggtagaagggcgccatgagactgaaacaccatgtagtcagtatagtggtggaagtgggggtggtagcagtcagtatagtagtggaagtgggggagagggtgttagtgaaagacacactatatgcgaaacaccacttacaaatattttaaatgtactaaaaactagtaatgcaaaggcagcaatgctagcaaaatttaaagagttatacggggtgagtttttcagaattagtaagaccatttaaaagtaataaatcaacgtgttgcgattggtgtattgctgcatttggacttacacccagtatagctgacagtataaaaacattattacaacaatattgtttatatttacacattcaaagtttagcatgttcatggggaatggttgtgttactattagtaagatataaatgtggaaaaaatagagaaacaattgaaaaattgctgtctaaactattatgtgtgtctccaatgtgtatgatgatagagcctccaaaattgcgtagtacagcagcagcattatattggtataaaacaggtatgtcaaatattagtgaagtgtatggagacacgccagaatggatacaaagacaaacagtattacaacatagttttaatgattgtacatttgaattatcacagatggtacaatgggcctacgataatgacatagtagacgatagtgaaattgcatataaatatgcacaattggcagacactaatagtaatgcaagtgcctttttaaaaagtaattcacaggcaaaaattgtaaaggattgtgcaacaatgtgtagacattataaacgagcagaaaaaaaacaaatgagtatgagtcaatggataaaatatagatgtgatagggtagatgatggaggtgattggaagcaaattgttatgtttttaaggtatcaaggtgtagactttatgtcatttctaactgcattaaaaagatttttgcaaggcatacctaaaaaaaattgcatattactatatggtgcagctaacacaggtaaatcattatttggtatgagtttaatgaaatttttgcaagggtctgtaatatgttttgtaaattctaaaagccatttttggttacaaccattagcagatgccaaaataggtatgttagatgatgctacagtgccctgttggaactacatagatgacaatttaagaaatgcattggatggaaatttagtttctatggatgtaaagcatagaccattggtacaactaaaatgccctccattattaattacatctaacattaatgctggtacagattccaggtggccttatttgcataatcgattggtggtgtttacatttccaaatgagtttccatttgacgaaaacggaaatccagtgtatgagcttaatgataagaactggaaatcctttttctcaaggacgtggtccagattaagtttgcacgaggacgaggacaaggaaaacgatggagactctttgccaacgtttaaatgtgtgtcaggacaaaatactaacacattatgaaaatgatagtacagacctacgtgaccatatagactattggaaacaaatgcgcctagaatgtgctatttattacaaggccagagaaatgggatttaaacatattaaccaccaggtggtgccaacactggctgtatcaaagaataaagcattacaagcaattgaactgcaactaacgttagaaacaatatataactcacaatatagtaatgaaaagtggacattacaagacgttagccttgaagtgtatttaactgcaccaacaggatgtataaaaaaacatggatatacagtggaagtgcagtttgatggagacatatgcaatacaatgcattatacaaactggaaatatatatatatttgtgaagaaacattagtaactgtggtagagggtcaagttgactattatggtttatattatgttcatgaaggaatacaaacatattttgtgcagtttaaagatgatgcagaaaaatatagtaaaaataaagtatgggaagttcatgcgggtggtcaggtaatattatgtcctacatctgtgtttagcagcgacgaagtatcctctgctgaaattattaggcagcacttggccaaccactccgccgcgacccataccaaagccgtcgccttgggcaccaaagaaacacagacgactatccagcgaccaagatcagagccagacaccggaaacccctgccacaccaataagttgttgcacagagactcagtggacagtgcttcaatcctcactgcagttaacagctcacacaaaggacggattaactgtaatagtaacactacacccatagtacatttaaaaggtgatgctaatactttaaaatgtttaagatatagatttaaaaagcattgtaaattgtatacagcagtgtcgtctacatggcattggacaggacataatgtaaaacataaaagtgcaattgttacacttacatatgatagtgaatgtcaacgtgaacaatttttgtctcaagtcaaaataccaaaaactattacagtgtctactggatttatgtctatatgacaaaccttgatactacatccacaacattactggcgtgctttttgctttgcttttgtgtgcttttgtgtgtctgcctattaatacgtccgctgcttttgtctgtgtctacatacacatcattaatactattggtattattattgtggataacagcagcctctgcgtttaggtgttttattgtatatattttatttgtttatataccattatttttaatacatacacatgcacgcttcttaattacataatgtatatgtacatattgtaattgttacatataattgttgtatattataacctactgatttttttttttttatttttatatatatagtttttttttatttgtttgtttgttttttaataaactgttattacttaacaatgcgacacaaacgttctgcaaaacgcacaaaacgtgcatcggccacccaactttataaaacatgcaaacaagcaggtacatgtccacctgacattatacctaaggttgaaggcaaaactattgctgatcaaatattacaatatggaagtatgggtgtattttttggtgggttaggaattggaacagggtcaggtacaggcggacgcactgggtatattccattaggaacaaggcctcccacagctacagatacacttgctcctgtaagaccccctttaacagtagatcctgtgggcccttctgatccttctatagtgtctttagtggaagaaactagttttattgatgctggtgcaccaacacctgtaccttccattcccccagatgtatcaggatttagtattacaacttcaactgataccacacctgctatattagatattaataatactgttactactgttactacacataataatcccacttttactgacccatctgtattgcagcctccaacacctgcagaaactggagggcattttacactttcatcatccactattagtacacataattatgaagaaattcctatggatacatttattgttagcacaaaccctaacacagtaactagtagcacacccataccagggtctcgcccagtggcacgccttggattatatagtcgcacaacacaacaagttaaagttgtagaccctgcttttgtaaccactcccactaaacttattacatatgataatcctgcatatgaaggtatagatgtggataatacagtatattttcctagtaatgataatagtattaatatagctccagatcctgactttttggatatagttgctttacataggccagcattaacctctaggcgtactggcattagatacagtagaattggtaataaacaaacactacgtactcgtagtggaaaatctataggtgctaaggtacattattattatgatttaagtactattaatcctgcagaagaaatagaattacaaactataacaccttctacatatactaccgcttcacatgcagcctcacccacttctattaataatggattatatgatatttatgcagatgactttattacagatacttctacaaccccagtaccatctataccctctacatccttatcaggttatattcctgcaaatacaacaattccttttggtggtgcatacaatattcctttagtatcaggtcctgatatacccattaatacaactgaccaaactccttcattaattcctatagttccagggtctccacaatatacaattattgctgatggaggtgacttttatttacatcctagttattacatgttacgaaaacgacgtaaacgtttaccatattttttttcagatgtctctttggctgcctagcgaggccactgtctacttgcctcctgtcccagtatctaaagttgtaagcacggatgaatatgttgcacgcacaaacatatattatcatgcaggaacatccagactacttgcagttggacatccctattttcctattaaaaaacctaacaataacaaaatattagttcctaaagtatcaggattacaatacagggtatttagaatatatttacctgaccccaataagtttggttttcctgacacctcattttacaatccagatacacagcggctggtttgggcctgtgtaggtgttgaggtaggtcgtggtcagccattaggtgtgggcattagtggccatccgttattaaataaattggatgacacagaaaatgctagtgcttatgcagcaaatgcaggtgtagataatagagaatgtatatctatggattacaaacaaacacaattgtgtttaattggttgcaaaccacctataggggaacactggggcaaaggatccccatgtaacaatgttgcagtaaatccaggtgattgtccaccattagagttaataaacacagttattcaggatggtgatatggttgataccggctttggtgctatggactttactacattacaggctaacaaaagtgaagttccactggatatttgtacgtctatttgcaaatatccagattatattaaaatggtgtcagaaccatatggcgacagcttatttttttatttacgaagggaacaaatgtttgttagacatttatttaatagggctggtgctgttggtgaaaatgtaccagacgatttatacattaaaggctctgggtctactgcaaatttagccagttcaaattattttcctacacctagtggttctatggttacctctgatgcccaaatatttaataaaccatattggttacaacgagcacagggccacaataatggcatttgttggggtaaccaactatttgttactgttgttgatactacacgcagtacaaatatgtcattatgtgctgccatatctacttcagaaactacatataaaaatactaactttaaagagtacctacgacatggggaggaatatgatttacagtttatttttcaactgtgcaaaataaccttaactgcagacgttatgacatacatacattctatgaattccactattttggaggactggaattttggtttacaacctcccccaggaggcacactagaagatacttataggtttgtaacatcccaggcaattgcttgtcaaaaacatacacctccagcacctaaagaagatccccttaaaaaatatactttttgggaagtaaatttaaaagaaaagttttctgcagacctagatcagtttcctttaggacgcaaatttttactacaagcaggatttaaggccaaaccaaaatttacattaggaaaacgaaaagctacacccaccacctcatctacctctacaactgctaaacgcaaaaaacgtaagctgtaagtattgtatgtatgttgaattagtgttgtttgttgtttatatgtttgtatgtgcttgtatgtgcttgtaaatattcagttgtatgtgtgtttgtatgtatggtataataaacacgtgtgtatgtgtttttaaatgcttgtgtaactattgtgtcatgcaacataaataaacttattgtttcaacacctactcattgtgttgtggttattcattgtatataaactatatttgctacatcctgtttttgttttatatatactatattttgtagcgccagcggccattttgtagcttcaaccgaattcggttgcatgctttttggcacaaaatgtatttttttaaatagttctatgtcagcaactatagtttaaacttgtacgtttcctgcttgccatgcgtgccaaatccctgttttcctgacctgcactgcttgccaaccattccattgttttttacactgcactatgtgcaactactgaatcactatgtacattgtgtcatataaaataaatcactatgcgccaacgccttaaataccgctgttaggcacatatttttggcttgttttaactaacctaattgcatatttggcataaggtttaaacttttaaggccaactaaatgtcaccttagttcatacatgaactgtgtaaaggttagtcatacattgttcatttttaaaactgcacatgggtgtgtgcaaaccgttttgggttacaaatttacaagcaacttatataataatactaaactacaataattcatgtataaaaccaagggtgtaaccgaaatcggttgaaccgaaaccggttagtataaaagcagacattttatgcaccaaaagagaactgcaatgtttcaggacccacaggagcgacccggaaagttaccagatttatgcacagagctgcaaacaactatacatgatataatattagaatgtgtgtactgcaagcaacagttactgcgacgtgaggtatatgactttgcttttcgggatttatgcatagtatatagagatgggaatccatatgcagtgtgtgagaaatgtttaaagttttattctaaaattagtgagtatagatattattgttatagtgtgtatggaacaacattagaacagcaatacaacaaaccgttgtgtgatttgttaattaggtgtattaactgtcaaaagccactgtgtcctgaagaaaagcaaagacatctggacaaaaagcaaagattccataatataaggggtcggtggaccggtcgatgtatgtcttgttgcagatcatcaagaacacgtagagaaacccagctgtaatcatgcatggagatacacctacattgcatgaatatatgttagatttgcaaccagagacaactgatctctactgttatgagcaattaaatgacagctcagaggaggaggatgaaatagatggtccagctggacaagcagaaccggacagagcccattacaatattgtaaccttttgttgcaagtgtgactctacgcttcggttgtgcgtacaaagcacacacgtagacatccgtacgttggaagacctgttaatgggcacactaggaattgtgtgccccatctgttctcagaaaccataatctacc

SEQ ID NO: 115 - DNA, 7904 bp, Human papillomavirus
  source 1..7904: mol_type = genomic DNA; note = sublineage C1; serotype = HPV16
atggctgatcctgcaggtaccaatggggaagagggtacgggatgtaatggatggttctatgtagaggctgtagtggaaaaaaaaacaggggatgctatatcagatgacgagaacgaaaatgacagtgatacaggtgaagatttggtagattttatagtaaatgataatgattatttaacacaggcagaaacagagacagcacatgcgttgtttactgcacaggaagcaaaagaacatagagatgcagtacaggttctaaaacgaaagtatttgggtagtccacttagtgatattagtgaatgtgtagacaataatattagtcctagattaaaagccatatgtatagaaaaacaaagtagagctgcaaaaaggagattatttgaaagcgaagacagcgggtatggcaatactgaagtggaaactcagcagatgttacaggtagaagggcgccatgagactgaaacaccatgtagtcagtatagtggtggaagtgggggtggtagcagtcagtatagtagtggaagtgggggagagggtgttagtgaaagacatactatatgcgaaacaccacttacaaatattttaaatgtactaaaaactagtaatgcgaaggcagcaatgctagcaaaatttaaagagttatacggggtgagtttttcagaattagtaagaccatttaaaagtaataaatcaacgtgttgcgattggtgtattgctgcatttggacttacacccagtatagctgacagtataaaaacattattacaacaatattgtttatatttacacattcaaagtttagcatgttcatggggaatggttgtgttactattagtaagatataaatgtggaaaaaatagagaaacaattgaaaaattgatgtctaaactattatgtgtgtctccaatgtgtatgatgatagagcctccaaaattgcgtagtacagcagcagcattatattggtataaaacaggtatgtcaaatattagtgaagtgtatggagacacgccagaatggatacaaagacaaacagtattacaacatagttttaatgattgtacatttgaattatcacagatggtacaatgggcctacgataatgacatagtagacgatagtgaaattgcatataaatatgcacaattggcagacactaatagtaatgcaagtgcctttttaaaaagtaattcacaggcaaaaattgtaaaggattgtgcaacaatgtgtagacattataaacgagcagaaaaaaaacaaatgagtatgagtcaatggataaaatatagatgtgatagggtagatgatggaggtgattggaagcaaattgttatgtttttaaggtatcaaggtgtagactttatgtcatttttaagtgcattaaaaaaatttctgcaaggtatacctaaaaaaaattgcatattattatatggtgcagctaacacaggtaaatcattatttggtatgagtttaatgaaatttttgcaagggtccgtaatatgttttgtaaattctaaaagccatttttggttacaaccattagcagatgccaaaataggtatgttagatgatgctacagtgccctgttggaactacatagatgacaatttaagaaatgcattggatggaaatttagtttctatggatgtaaagcatagaccattggtacaactaaaatgtcctccattattaattacatctaacattaatgctggtacagattccaggtggccttatttacataatcgattggtggtgtttacatttccaaatgagtttccatttgacgaaaacggaaatccagtgtatgagcttaatgataagaactggaaatcctttttctcaaggacgtggtccagattaagtttgcacgaggacgaggacaaggaaaacgatggagactctttgccaacgtttaaatgtgtgtcaggacaaaatactaacacattatgaaaatgatagtacagacctacgtgaccatatagactattggaaacaaatgcgcctagaatgtgctatttattacaaggccagagaaatgggatttaaacatattaaccaccaggtggtgccaacactggctgtatcaaagaataaagcattacaagcaattgaactgcaactaacgttagaaacaatatataactcacaatatagtaatgaaaagtggacattacaagatgttagccttgaagtgtatttaactgcaccaacaggatgtataaaaaaacatggatatacagtggaagtgcagtttgatggagacatatgcaatacaatgcattatacaaactggaaatatatatatatttgtgaagaaacatcagtaactgtggtagagggtcaagttgactattatggtttatattatgttcatgaaggaatacaaacatattttgtgcagtttaaagatgatgcagaaaaatatagtaaaaataaagtatgggaagttcatgcgggtggtcaggtaatattatgtcctacatctgtgtttagcagcgacgaagtatcctctgctgaaattattaggcagcacttggccaaccactccgccgcgacccataccaaaaccgtcgccttgggcaccaaagaaacacagacgactatccagcgaccaagatcagagccagacaccggaaacccctgccacaccaacaagttgttgcacagagactccgtggacagtgctccaatcctcactgcagttaacagctcacacaaaggacggattaactgtaatagtaacactacacccatagtacatttaaaaggtgatgctaatactttaaaatgtttaagatatagatttaaaaagcattgtaaattgtatacagcagtgtcgtccacatggcattggacaggacataatgtaaaacataaaagtgcaattgttacacttacatatgatagtgaatgtcaacgtgaacaatttttgtctcaagtgaaaataccaaaaactattacagtgtctactggatttatgtctatatgacaaaccttgatactgcatccacaacattactggcgtgctttttgctttgcttttgtgtgcttttgtgtgtctgcctattaatacgtccgctgcttttgtctgtgtctacatacacatcattaatactattggtattagtattgtggataacagcagcctctgcgtttaggtgttttattgtatatattgtatttgtttatatacccttatttttaatacatacacatgcacgcttcttaattacataatgtatatgtacataatgtaattgttacatataattgttgtataccatcacttactgatttttcttttgtatttttatatatatagttttttttcttatttgtttgttttttaataaactgttattacttaacaatgcgacacaaacgttctgcaaaacgcacaaaacgtgcatcggccacccaactttataaaacatgcaaacaggcaggtacatgtccacctgacattatacctaaggttgaaggcaaaactattgctgatcaaatattacaatatggaagtatgggtgtattttttggtgggttaggaattggaacagggtctggtacaggcggacgcactgggtatattccattgggaacaaggcctcccacagctacagatacacttgctcctgtaagaccccctttaacggtagatcctgtgggcccttctgatccgtctatagtttcgttagtggaagaaactagttttattgatgctggtgcaccaacacctgtaccttccattcccccagatgtatcaggatttagtattacaacttcaactgataccacacctgctatattagatattaataatactgttactactgttactacacataataatcccacttttactgacccatctgtattgcagcctccaacacctgcagaaactggagggcattttacactttcatcatccactattagtacacataattatgaagaaattcctatggatacatttattgttagcacaaatcctaacacagtaactagtagcacacccataccggggtctcgcccagtggcacgcctaggattatatagtcgcacaacacaacaagttaaagttgtagaccctgcttttgtaaccactcccactaaacttattacatatgataatcctgcatatgaaggtatagatgtggataatacattatattttgctagtaatgataatagtattaatatagctccagatcctgactttttggatatagttgctttacataggccagcattaacctctaggcgtactggcattagatacagtagaattggtaataaacaaacactacgtactcgtagtggaaaatctataggtgctaaggtacattattattatgatttaagtactattaatcctgcagaagaaatagaattgcaaactataacaccttctacatatactaccccttcacatgcagcctcacccacttctattaataatggattatatgatatttatgcagatgactttattacagatacttttacaaccccagtaccatctataccctctacatccttatcaggttatattcctgcaaatacaacaattccttttggtggtgcatacaatattcctttagtatcaggtcctgatatacctattaatacaactgaccaaactccttcattaattcctatagttccagggtctccacaatatacaattattgctgatggaggtgacttttatttacatcctagttattacatgttacgaaaacgacgtaaacgtttaccatattttttttcagatgtctctttggctgcctagtgaggccactgtctacttgcctcctgtcccagtatctaaagttgtaagcacggatgaatatgttgcacgcacaaacatatattatcatgcaggaacatccagactacttgcagttggacatccctattttcctattaaaaaacctaacaataacaaaatattagttcctaaagtatcaggattacaatacagggtatttagaatatatttacctgaccccaataagtttggttttcctgacacctcattttacaatccagatacacagcggctggtttgggcctgtgtaggtgttgaggtaggtcgtggtcagccattaggtgtgggcattagtggccatcctttattaaataaattggatgacacagaaaatgctagtgcttatgcagcaaatgcaggtgtggataatagagaatgtatatctatggattacaaacaaacacaattgtgtttaattggttgcaaaccacctataggggaacactggggcaaaggatccccatgtaacaatgttgcagtaactccaggtgattgtccaccattagagttaataaacacagttattcaggatggtgatatggttgataccggctttggtgctatggactttactacattacaggctaacaaaagtgaagttccactggatatttgtacgtctatttgcaaatatccagattatattaaaatggtgtcagaaccatatggcgacagcttatttttttatttacgaagggaacaaatgtttgttagacatttatttaatagggctggtgctgttggtgaaaatgtaccagacgatttatacattaaaggctctgggcctactgcaaatttagccagttcaaattattttcctacacctagtggttctatggttacctctgatgcccaaatatttaataaaccttattggttacaacgagcacagggccacaataatggcatttgttggggtaaccaactatttgttactgttgttgatactacacgcagtacaaatatgtcattatgtgctgccatatctacttcagaacctacatataaaaatactaactttaaagagtacctacgacatggggaggaatatgatttacagtttatttttcaactgtgcaaaataaccttaactgcagacgttatgacatacatacattctatgaattccactattttggaggactggaattttggtttacaacctcctccaggaggcacactagaagatacttataggtttgtaacatcccaggcaattgcttgtcaaaaacatacacctccagcacctaaagaagatccccttaaaaaatatactttttgggaagtaaatttaaaagaaaagttttctgcagacctagatcagtttcctttaggacgcaaatttttactacaagcaggatttaaggccaaaccaaaatttacattaggaaaacgaaaagctacacccaccacctcatctacctctacaactgctaaacgcaaaaaacgtaagctgtaagtattgtatgtatgttgaattagtgttgtttgttgtttatatgtttgtatgtgcttgtatgtgcttgtaaatattacgttgtatgtgtgtttgtatgtatggtataataaacacgtgtgtatgtgtttttaaatgcttgtgtaactattgtgtcatgcaacataaataaacttattgtttcaacacctactaattgtgttgtggttattcattgtatataaactatatttcctacatcctgtttttgttttatatatactatattttgtagcgccagcagccattttgtagcttcaaccgatttcggttgcatgctttttggcacaaactgtatttttttaaatagttctatgtcagcaactatagtttaaacttgtacgtttcctgcttgccatgcgtgccaaatccctgttttcctgacctgcactgcttgccaaccattccattgttttttacactgcactatgtgcaactactgaatcactatgtacattgtgtcatataaaataaattactatgcgccaacgccttacataccgctgttaggcacatatttttggcttgttttaactaacctaattgcatatttggcataaggtttaaacttttaaggccaactaaatgtcaccttagttcatacatgaactgtgtaaaggttagtcatacattattcatttttacagctgcacatgggtgtgtgcaaaccgttttgggttacacatttacaagcaacttatataataatactaaactacaataattcatgtataaaactaagggtgtaaccgaaatcggttgaaccgaaaccggttagtataaaagcagacattttatgcaccaaaagagaactgcaatgttccaggacccacaggagcgacccataaagttaccagatttatgcacagagctgcaaacaactatacatgatataatattagaatgtgtgtactgcaagcaacagttactgcgacgtgaggtatatgactttgcttttcgggatttatgcatagtatatagagatgggaatccatatgcagtgtgtgataaatgtttaaagttttattctaaaattagtgagtatagatattattgttatagtttgtatggaacaacattagaacagcaatacaacaaaccgttgtgtgatttgttgattaggtgtattaactgtcaaaagccactgtgtcctgaagaaaagcaaagacatctggacaaaaagcaaagattccataatataaggggtcggtggaccggtcgatgtatgtcttgttgcagatcatcaagaacacgtagagaaacccagctgtaatcatgcatggagatacacctacattgcatgaatatatgttagatttgcaaccagagacaactgatctctactgttatgagcaattaagtgacagctcagaggaggaggatgaaatagatggtccagctggacaagcagaaccggacagagcccattacaatattgtaaccttttgttgcaagtgtgactctacgcttcggttgtgcgtacaaagcacacacgtagacatccgtacgttggaagacctgttaatgggcacactaggaattgtgtgccccatctgttctcagaaaccataatctacc

SEQ ID NO: 116 - DNA, 7904 bp, Human papillomavirus
  source 1..7904: mol_type = genomic DNA; note = sublineage C2; serotype = HPV16
atggccgatcctgcaggtaccaatggggaagagggtacgggatgtaatggatggttctatgtagaggctgtagtggaaaaaaaaacaggggatgctatatcagatgacgagaatgaaaatgacagtgatacaggtgaagatttggtagattttatagtaaatgataatgattatttaacacaggcagaaacagagacagcacatgcgttgtttactgcacaggaagcaaaagaacatagagatgcagtacaggttctaaaacgaaagtatttgggtagtccacttagtgatattagtgaatgtgtagacaataatattagtcctagattaaaagccatatgtatagaaaaacaaagtagagctgcaaaaaggagattatttgaaagcgaagacagcgggtatggcaatactgaagtggaaactcagcagatgttacaggtagaagggcgccatgagactgaaacaccatgtagtcagtatagtggtggaagtgggggtggtagcagtcagtatagtagtggaagtgggggagagggtgttagtgaaagacacactatatgcgaaacaccacttacaaatattttaaatgtactaaaaactagtaatgcaaaggcagcaatgctagcaaaatttaaagagttatacggggtgagtttttcagaattagtaagaccatttaaaagtaataaatcaacgtgttgcgattggtgtattgctgcatttggacttacacccagtatagctgacagtataaaaacattattacaacaatattgtttatatttacacattcaaagtttagcatgttcatggggaatggttgtgttactattagtaagatataaatgtggaaaaaatagagaaacaattgaaaaattgatgtctaaactattatgtgtgtctccaatgtgtatgatgatagagcctccaaaattgcgtagtacagcagcagcattatattggtataaaacaggtatgtcaaatattagtgaagtgtatggagacacgccagaatggatacaaagacaaacagtattacaacatagttttaatgattgtacatttgaattatcacagatggtacaatgggcctacgataatgacatagtagacgatagtgaaattgcatataaatatgcacaattggcagacactaatagtaatgcaagtgcctttttaaaaagtaattcacaggcaaaaattgtaaaggattgtgcaacaatgtgtagacattataaacgagcagaaaaaaaacaaatgagtatgagtcaatggataaaatatagatgtgatagggtagatgatggaggtgattggaagcaaattgttatgtttttaaggtatcaaggtgtagactttatgtcatttttaagtgcattaaaaaaatttctgcaaggtatacctaaaaaaaattgcatattattatatggtgcagctaacacaggtaaatcattatttggtatgagtttaatgaaatttttgcaagggtccgtaatatgttttgtaaattctaaaagccatttttggttacaaccattagcagatgccaaaataggtatgttagatgatgctacagtgccctgttggaactacatagatgacaatttaagaaatgcattggatggaaatttagtttctatggatgtaaagcatagaccattggtacaactaaaatgccctccattattaattacatctaacattaatgctggtacagattccaggtggccttatttacataatcgattggtggtgtttacatttccaaatgagtttccatttgacgaaaacggaaatccagtgtatgagcttaatgataagaactggaaatcctttttctcaaggacgtggtccagattaagtttgcacgaggacgaggacaaggaaaacgatggagactctttgccaacgtttaaatgtgtgtcaggacaaaatactaacacattatgaaaatgatagtacagacctacgtgaccatatagactattggaaacaaatgcgcctagaatgtgctatttattacaaggccagagaaatgggatttaaacatattaaccaccaggtggtgccaacactggctgtatcaaagaataaagcattacaagcaattgaactgcaactaacgttagaaacaatatataactcacaatatagtaatgaaaagtggacattacaagatgttagccttgaagtgtatttaactgcaccaacaggatgtataaaaaaacatggatatacagtggaagtgcagtttgatggagacatatgcaatacaatgcattatacaaactggaaatatatatatatttgtgaagaaacatcagtaactgtggtagagggtcaagttgactattatggtttatattatgttcatgaaggaatgcaaacatattttgtgcagtttaaagatgatgcagaaaaatatagtaaaaataaagtatgggaagttcatgcgggtggtcaggtaatattatgtcctacatctgtgtttagcagcgacgaagtatcctctgctgaaattattaggcagcacttggccaaccactccgccgcgacccataccaaaaccgtcgccttgggcaccaaagaaacacagacgactatccagcgaccaagatcagagccagacaccggaaacccctgccacaccaacaagttgttgcacagagactccgtggacagtgctccaatcctcactgcagttaacagctcacacaaaggacggattaactgtaatagtaacactacacccatagtacatttaaaaggtgatgctaatactttaaaatgtttaagatatagatttaaaaagcattgtaaattgtatacagcagtgtcgtccacatggcattggacaggacataatgtaaaacataaaagtgcaattgttacacttacatatgatagtgaatgtcaacgtgaacaatttttgtctcaagtgaaaataccaaaaactattacagtgtctactggatttatgtctatatgacaaaccttgatactgcatccacaacattactggcgtgctttttgctttgcttttgtgtgcttttgtgtgtctgcctattaatacgtccgctgcttttgtctgtgtctacatacacatcattaatactattggtattattattgtggataacagcagcctctgcgtttaggtgttttattgtatatattctatttgtttatataccattatttttaatacatacacatgcacgcttcttaattacataatgtatatgtacataatgtaattgttacatataattgttgtataccatcacttactgatttttcttttttatttttatatatatagtttcttttcttatttgtttggtttttaataaactgttattacttaacaatgcgacacaaacgttctgcaaaacgcacaaaacgtgcatcggccacccaactttataaaacatgcaaacaggcaggtacatgtccacctgacattatacctaaggttgaaggcaaaactattgctgatcaaatattacaatatggaagtatgggtgtattttttggtgggttaggaattggaacagggtctggtacaggcggacgcactgggtatattccattaggaacaaggcctcccacagctacagatacacttgctcctgtaagaccccctttaacggtagatcctgtgggcccttctgatccgtctatagtttctttagtggaagaaactagttttattgatgctggtgcaccaacacctgtaccttccattcccccagatgtatcaggatttagtattacaacttcaactgataccacacctgctatattagatattaataatactgttactactgttactacacataataatcccacttttactgacccatctgtattgcagcctccaacacctgcagaaactggagggcattttacactttcatcatccactattagtacacataattatgaagaaattcctatggatacatttattgttagcacaaatcctaacacagtaactagtagcacacccataccggggtctcgcccagtggcacgcctaggattatatagtcgcacaacacaacaagttaaagttgtagaccctgcttttgtaaccactcccactaaacttattacatatgataatcctgcatatgaaggtatagatgtggataatacattatattttcctagtaatgataatagtattaatatagctccagatcctgactttttggatatagttgctttacataggccagcattaacctctaggcgtactggcattagatacagtagaattggtaataaacaaacactacgtactcgtagtggaaaatctataggtgctaaggtacattattattatgatttaagtactattaatcctgcagaagaaatagaattgcaaactataacaccttctacatatactaccacttcacatgcagcctcacccacttctattaataatggattatatgatatttatgcagatgactttattacagatactgttacaaccccagtaccatctataccctctacatccttatcaggttatattcctgcaaatacaacaattccttttggtggtgcatacaatattcctttagtatcaggtcctgatatacctattaatacaactgaccaaactccttcattaattcctatagttccagggtctccacaatatacaattattgctgatggaggtgacttttatttacatcctagttattacatgttacgaaaacgacgtaaacgtttaccatattttttttcagatgtctctttggctgcctagtgaggccactgtctacttgcctcctgtcccagtatctaaagttgtaagcacggatgaatatgttgcacgcacaaacatatattatcatgcaggaacatccagactacttgcagttggacatccctattttcctattaaaaaacctaacaataacaaaatattagttcctaaagtatcaggattacaatacagggtatttagaatatatttacctgaccccaataagtttggttttcctgacacctcattttacaatccagatacacagcggctggtttgggcctgtgtaggtgttgaggtaggtcgtggtcagccattaggtgtgggcattagtggccatcctttattaaataaattggatgacacagaaaatgctagtgcttatgcagcaaatgcaggtgtggataatagagaatgtatatctatggattacaaacaaacacaattgtgtttaattggttgcaaaccacctataggggaacactggggcaaaggatccccatgtaacaatgttgcagtaactccaggtgattgtccaccattagagttaataaacacagttattcaggatggtgatatggttgataccggctttggtgctatggactttactacattacaggctaacaaaagtgaagttccactggatatttgtacgtctatttgcaaatatccagattatattaaaatggtgtcagaaccatatggcgacagcttatttttttatttacgaagggaacaaatgtttgttagacatttatttaatagggctggtgctgttggtgaaaatgtaccagacgatttatacattaaaggctctgggcctactgcaaatttagccagttcaaattattttcctacacctagtggttctatggttacctctgatgcccaaatatttaataaaccttattggttacaacgggcacagggccacaataatggcatttgttggggtaaccaactatttgttactgttgttgatactacacgcagtacaaatatgtcattatgtgctgccatatctacttcagaacctacatataaaaatactaactttaaagagtacctacgacatggggaggaatatgatttacagtttatttttcaactgtgcaaaataaccttaactgcagacgttatgacatacatacattctatgaattccactattttggaggactggaattttggtttacaacctcctccaggaggcacactagaagatacttataggtttgtaacatcccaggcaattgcttgtcaaaaacatacacctccagcacctaaagaagatccccttaaaaaatatactttttgggaagtaaatttaaaagaaaagttttctgcagacctagatcagtttcctttaggacgcaaatttttactacaagcaggatttaaggccaaaccaaaatttacattaggaaaacgaaaagctacacccaccacctcatctacctctacaactgcaaaacgcaaaaaacgtaagctgtaagtattgtatgtatgttgaattagtgttgtttgttgtttatatgtttgtatgtgcttgtatgtgcttgtaactattacgttgtatgtgtgtttgtatgtatggtataataaacacgtgtgtatgtgtttttaaatgcttgtgtaactattgtgtcatgcaacataaataaacttattgtttcaacacctactaattgtgttgtggttattcattgtatataaactatatttgctacatcctgtttttgttttatatatactatattttgtagcgccagcggccattttgtagcttcaaccgaattcggttgcatgctttttggcacaaactgtatttttttaaatagttctatgtcagcaactatagtttaaacttgtacgtttcctgcttgccatgcgtgccaaatccctgttttcctgacctgcactgcttgccaaccattccattgttttttacactgcactatgtgcaactactgaatcactatgtacattgtgtcatataaaataaattgctatgcgccaacgccttaaataccgctgttaggcacatatttttggcttgttttaactaacctaattgcatatttggcataaggtttaaacttttaaggccaactaaatgtcaccttagttcatacatgaactgtgtaaaggttagtcatacattattcatttttacaactgcacatgggtgtgtgcaaaccgttttgggttacacatttacaagcaacttatataataatactaaactacaataattcatgtataaaactaagggtgtaaccgaaatcggttgaaccgaaaccggttagtataaaagcagacattttatgcaccaaaagagaactgcaatgtttcaggacccacaggagcgacccagaaagataccagatttatgcacagagctgcaaacaactatacatgatataatattagaatgtgtgtactgcaagcaacagttactgcgacgtgaggtatatgactttgcttttcgggatttatgcatagtatatagagatgggaatccatatggagtgtgtgataaatgtttaaagttttattctaaaattagtgagtatagatattattgttatagtttgtatggaacaacattagaacagcaatacaacaaaccgttgtgtgatttgttaattaggtgtattaactgtcaaaagccactgtgtcctgaagaaaagcaaagacatctggacaaaaagcaaagattccataatataaggggtcggtggaccggtcgatgtatgtcttgttgcagatcatcaagaacacgtagagaaacccagctgtaatcatgcatggagatacacctacattgcatgaatatatgttagatttgcaaccagagacaactgatctctactgttatgagcaattaaatgacagctcagaggaggaggatgaaatagatggtccagctggacaagcagaaccggacagagcccattacaatattgtaaccttttgttgcaagtgtgactctacgcttcggttgtgcgtacaaagcacacacgtagacatccgtacgttggaagacctgttaatgggcacactaggaattgtgtgccccatctgttctcagaaaccataatctacc

SEQ ID NO: 117 - DNA, 7904 bp, Human papillomavirus
  source 1..7904: mol_type = genomic DNA; note = sublineage C3; serotype = HPV16
atggctgatcctgcaggtaccaatggggaagagggtacgggatgtaatggatggttctatgtagaggctgtagtggaaaaaaaaacaggggatgctatatcagatgacgagaacgaaaatgacagtgatacaggtgaagatttggtagattttatagtaaatgataatgattatttaacacaggcagaaacagagacagcacatgcgttgtttactgcacaggaagcaaaagaacatagagatgcagtacaggttctaaaacgaaagtatttgggtagtccacttagtgacattagtgaatgtgtagacaataatattagtcctagattaaaagccatatgtatagaaaaacaaagtagagctgcaaaaaggagattatttgaaagcgaagacagcgggtatggcaatactgaagtggaaactcagcagatgttacaggtagaagggcgccatgagactgaaacaccatgtagtcagtatagtggtggaagtgggggtggtagcagtcagtatagtagtggaagtgggggagagggtgttagtgaaagacacactatatgcgaaacaccacttacaaatattttaaatgtactaaaaactagtaatgcaaaggcagcaatgctagcaaaatttaaagagttatacggggtgagtttttcagaattagtaagaccatttaaaagtaataaatcaacgtgttgcgattggtgtattgctgcatttggacttacacccagtatagctgacagtataaaaacattattacaacaatattgtttatatttacacattcaaagtttagcatgttcatggggaatggttgtgttactattagtaagatataaatgtggaaaaaatagagaaacaattgaaaaattgatgtctaaactattatgtgtgtctccaatgtgtatgatgatagagcctccaaaattgcgtagtacagcagcagcattatattggtataaaacaggtatgtcaaatattagtgaagtgtatggagacacgccagaatggatacaaagacaaacagtattacaacatagttttaatgattgtacatttgaattatcacagatggtacaatgggcctacgataatgacatagtagacgatagtgaaattgcatataaatatgcacaattggcagacactaatagtaatgcaagtgcctttttaaaaagtaattcacaggcaaaaattgtaaaggattgtgcaacaatgtgtagacattataaacgagcagaaaaaaaacaaatgagtatgagtcaatggataaaatatagatgtgatagggtagatgatggaggtgattggaagcaaattgttatgtttttaaggtatcaaggtgtagactttatgtcatttttaagtgcattaaaaaaatttctgcaaggtatacctaaaaaaaattgcatattattatatggtgcagctaacacaggtaaatcattatttggtatgagtttaatgaaatttttgcaagggtccgtaatatgttttgtaaattctaaaagccatttttggttacaaccattagcagatgccaaaataggtatgttagatgatgctacagtgccctgttggaactacatagatgacaatttaagaaatgcattggatggaaatttagtttctatggatgtaaagcatagaccattggtacaactaaaatgccctccattattaattacatctaacattaatgctggtacagattccaggtggccttatttacataatcgattggtggtgtttacatttccaaatgagtttccatttgacgaaaacggaaatccagtgtatgagcttaatgataagaactggaaatcctttttctcaaggacgtggtccagattaagtttgcacgaggacgaggacaaggaaaacgatggagactctttgccaacgtttaaatgtgtgtcaggacaaaatactaacacattatgaaaatgatagtacagacctacgtgaccatatagactattggaaacaaatgcgcctagaatgtgctatttattacaaggccagagaaatgggatttaaacatattaaccaccaggtggtgccaacactggctgtatcaaagaataaagcattacaagcaattgaactgcaactaacgttagaaacaatatataactcacaatatagtaatgaaaagtggacattacaagatgttagccttgaagtgtatttaactgcaccaacaggatgtataaaaaaacatggatatacagtggaagtgcagtttgatggagacatatgcaatacaatgcattatacaaactggaaatatatatatatttgtgaagaaacatcagtaactgtggtagagggtcaagttgactattatggtttatattatgttcatgaaggaatacaaacatattttgtgcagtttaaagatgatgcagaaaaatatagtaaaaataaagtatgggaagttcatgcgggtggtcaggtaatattatgtcctacatctgtgtttagcagcgacgaagtatcctctgctgaaattattaggcagcacttggccaaccactccgccgcgacccataccaaaaccgtcgccttgggcaccaaagaaacacagacgactatccagcgaccaagatcagagccagacaccggaaacccctgccacaccaacaagttgttgcacagagactccgtggacagtgctccaatcctcactgcagttaacagctcacacaaaggacggattaactgtaatagtaacactacacccatagtacatttaaaaggtgatgctaatactttaaaatgtttaagatatagatttaaaaagcattgtaaattgtatacagcagtgtcgtccacatggcattggacaggacataatgtaaaacataaaagtgcaattgttacacttacatatgatagtgaatgtcaacgtgaacaatttttgtctcaagtgaaaataccaaaaactattacagtgtctactggatttatgtctatatgacaaaccttgatactgcatccacaacattactggcgtgctttttgctttgcttttgtgtgcttttgtgtgtctgcctattaatacgtccgctgcttttgtctgtgtctacatacacatcattaatactattggtattattattgtggataacagcagcctctgcgtttaggtgttttcttgtatatattgtatttgtttatataccattatttttaatacatacacatgcacgcttcttaattacataatgtatatgtacataatgtaattgttacatataattgttgtataccatcacttactgatttttcttttttatttttatatatatagttttttttcttatttgtttgttttttaataaactgtgattacttaacaatgcgacacaaacgttctgcaaaacgcacaaaacgtgcatcggccacccaactttataaaacatgcaaacaggcaggtacatgtccacctgacattatacctaaggttgaaggcaaaactattgctgatcaaatattacaatatggaagtatgggtgtattttttggtgggttaggaattggaacagggtctggtacaggcggacgcactgggtatattccattaggaacaaggcctcccacagctacagatacacttgctcctgtaagaccccctttaacggtagatcctgtgggcccttctgatccgtctatagtttctttagtggaagaaactagttttattgatgctggtgcaccaacacctgtaccttccattcccccagatgtatcaggatttagtattacaacttcaactgatactacacctgctatattagatattaataatactgttactactgttactacacatactaatcccacttttactgacccatctgtattgcagcctccaacacctgcagaaactggagggcattttacactttcatcatccactattagtacacataattatgaagaaattcctatggatacatttattgttagcacaaatcctaacacagtaactagtagcacacccataccggggtctcgcccagtggcacgcctaggattatatagtcgcacaacacaacaagttaaagttgtagaccctgcttttgtaaccactcccactaaacttattacatatgataatcctgcatatgaaggtatagatgtggataatacattatattttcctagtaatgataatagtattaatatagctccagatcctgactttttggatatagttgctttacataggccagcattaacctctaggcgtactggcattagatacagtagaattggtaataaacaaacactacgtactcgtagtggaaaatctataggtgctaaggtacattattattatgatttaagtactattaatcctgcagaagaaatagaattgcaaactataacaccttctacatatactaccacttcacatgcagcctcacccacttctattaataatggattatatgatatttatgcggatgactttattacagatacttttacaaccccagtaccatctataccctctacatccttatcaggttatattcctgcaaatacaacaattccttttggtggtgcatacaatattcctttagtatcaggtcctgatatacctattaatacaactgaccaaactccttcattaattcctatagttccagggtctccacactatacaattattgctgatggaggtgacttttatttacatcctagttattacatgttacgaaaacgacgtaaacgtttaccatattttttttcagatgtctctttggctgcctagtgaggccactgtctacttgcctcctgtcccagtatctaaagttgtaagcacggatgaatatgttgcacgcacaaacatatattatcatgcaggaacatccagactacttgcagttggacatccctattttcctattaaaaaacctaacaataacaaaatattagttcctaaagtatcaggattacaatacagagtatttagaatatatttacctgaccccaataagtttggttttcctgacacctcattttacaatccagatacacagcggctggtttgggcctgtgtaggtgttgaggtaggtcgtggtcagccattaggtgtgggcattagtggccatcctttattaaataaattggatgacacagaaaatgctagtgcttatgcagcaaatgcaggtgtggataatagagaatgtatatctatggattacaaacaaacacaattgtgtttaattggttgcaaaccacctataggggaacactggggcaaaggatccccatgtaacaatgttgcagtaactccaggtgattgtccaccattagagttaataaacacagttattcaggatggtgatatggttgataccggctttggtgctatggactttactacattacaggctaacaaaagtgaagttccactggatatttgtacgtctatttgcaaatatccagattatattaaaatggtgtcagaaccatatggcgacagcttatttttttatttacgaagggaacaaatgtttgttagacatttatttaatagggctggtactgttggtgaaagtgtaccagacgatttatacattaaaggctctgggcctactgcaaatttagccagttcaaattattttcctacacctagtggttctatggttacctctgatgcccaaatatttaataaaccttattggttacaacgagcacagggccacaataatggcatttgttggggtaaccaactatttgttactgttgttgatactacacgcagtacaaatatgtcattatgtgctgccatatctacttcagaacctacatataaaaatactaactttaaagagtacctacgacatggggaggaatatgatttacagtttatttttcaactgtgcaaaataaccttaactgcagacgttatgacatacatacattctatgaattccactattttggaggactggaattttggtttacaacctcctccaggaggcacactagaagatacttataggtttgtaacctcccaggcaattgcttgtcaaaaacatacacctccagcacctaaagaagatccccttaaaaaatatactttttgggaagtaaatttaaaagaaaagttttctgcagacctagatcagtttcctttaggacgcaaatttttactacaagcaggatttaaggccaaaccaaaatttacattaggaaaacgaaaagctacacccaccacctcatctacctctacaactgctaaacgcaaaaaacgtaagctgtaagtattgtatgtatgttgaattagtgttgtttgttgtttatatgtttgtatgtgcttgtatgtgcttgtaaatattacgttgtatgtgtgtttgtatgtatggtataataaacacgtgtgtatgtgtttttaaatgcttgtgtaactattgtgtcatgcaacataaataaacttattgtttcaacacctactaattgtgttgtggttattcattgtatataaactatatttgctacatcctgtttttgttttatatatactatattttgtagcgccagcggccattttgtagcttcaaccgaattcggttgcatgctttttggcacaaactgtatttttttaaatagttctatgtcagcaactatagtttaaacttgtacgtttcctgcttgccatgcgtgccaaatccctgttttcctgacctgcactgcttgccaaccattccattgttttttacactgcactatgtgcaactactgaatcactatgtacattgtgtcatataaaataaattactatgcgccaacgccttaaataccgctgttaggcacatatttttggcttgttttaactaacctaattgcatatttggcataaggtttaaacttttaaggccaactaaatgtcaccttagttcatacatgaactgtgtaaaggttagtcatacattattcatttttacaactgcacatgggtgtgtgcaaaccgttttgggttacacatttacaagcaacttatataataatactaaactacaataattcatgtataaaactaagggtgtaaccgaaatcggttgaaccgaaaccggttagtataaaagcagacattttatgcaccaaaagagaactgcaatgtttcaggacccacaggagcgacccagaaagttaccagatttatgcacagagctgcaaacaactatacatgatataatattagaatgtgtgtactgcaagcaacagttactgcgacgtgaggtatatgactttgcttttcgggatttatgcatagtatatagagatgggaatccatatgcagtgtgtgataaatgtttaaagttttattctaaaattagtgagtatagatattattgttatagtttgtatggaacaacattagaacagcaatacaacaaaccgttgtgtgatttgttaattaggtgtattaactgtcaaaagccactgtgtcctgaagaaaagcaaagacatctggacaaaaagcaaagattccataatataaggggtcggtggaccggtcgatgtatgtcttgttgcagatcatcaagaacacgtagagaaacccagctgtaatcatgcatggagatacacctacattgcatgaatatatgttagatttgcaaccagagacaactgatctctactgttatgagcaattaaatgacagctcagaggaggaggatgaaatagatggtccagctggacaagcagaaccggacagagcccattacaatattgtaaccttttgttgcaagtgtgactctacgcttcggttgtgcgtacaaagcacacacgtagacatccgtacgttggaagacctgttaatgggcacactaggaattgtgtgccccatctgttctcagaaaccataatctacc

SEQ ID NO: 118 - DNA, 7904 bp, Human papillomavirus
  source 1..7904: mol_type = genomic DNA; note = sublineage C4; serotype = HPV16
atggctgatcctgcaggtaccaatggggaagagggtacgggatgtaatggatggttctatgtagaggctgtagtggaaaaaaaaacaggggatgctatatcagatgacgagaacgaaaatgacagtgatacaggtgaagatttggtagattttatagtaaatgataatgattatttaacacaggcagaaacagagacagcacatgcgttgtttactgcacaggaagcaaaagaacatagagatgcagtacaggttctaaaacgaaagtatctgggtagtccacttagtgatattagtgaatgtgtagacaataatattagtcctagattaaaagccatatgtatagaaaaacaaagtagagctgcaaaaaggagattatttgaaagcgaagacagcgggtatggcaatactgaagtggaaactcagcagatgttacaggtagaagggcgccatgagactgaaacaccatgtagtcagtatagtggtggaagtgggggtggtagcagtcagtatagtagtggaagtgggggagagggtgttagtgaaagacacactatatgcgaaacaccacttacaaatattttaaatgtactaaaaactagtaatgcaaaggcagcaatgctagcaaaatttaaagagttatacggggtgagtttttcagaattagtaagaccatttaaaagtaataaatcaacgtgttgcgattggtgtattgctgcatttggacttacacccagtatagctgacagtataaaaacattattacaacaatattgtttatatttacacatccaaagtttagcatgttcatggggaatggttgtgttactattagtaagatataaatgtggaaaaaatagagaaacaattgaaaaattgatgtctaaactattatgtgtgtctccaatgtgtatgatgatagagcctccaaaattgcgtagtacagcagcagcattatattggtataaaacaggtatgtcaaatattagtgaagtgtatggagacacgccagaatggatacaaagacaaacagtattacaacatagttttaatgattgtacatttgaattatcacagatggtacaatgggcctacgataatgacatagtagacgatagtgaaattgcatataaatatgcacaattggcagacactaatagtaatgcaagtgcctttttaaaaagtaattcacaggcaaaaattgtaaaggattgtgcaacaatgtgtagacattataaacgagcagaaaaaaaacaaatgagtatgagtcaatggataaaatatagatgtgatagggtagatgatggaggtgattggaagcaaattgttatgtttttaaggtatcaaggtgtagactttatgtcatttttaagtgcattaaaaaaatttctgcaaggtatacctaaaaaaaattgcatattattatatggtgcagctaacacaggtaaatcattatttggtatgagtttaatgaaatttttgcaagggtccgtaatatgttttgtaaattctaaaagccatttctggttacaaccattagcagatgccaaaataggtatgttagatgatgctacagtgccctgttggaactacatagatgacaatttaagaaatgcattggatggaaatttagtttctatggatgtaaagcatagaccattggtacaactaaaatgccctccattattaattacatctaacattaatgctggtacagattccaggtggccttatttacataatcgattggtggtgtttacatttccaaatgagtttccatttgacgaaaacggaaatccagtgtatgagcttaatgataagaactggaaatcctttttctcaaggacgtggtccagattaagtttgcacgaggacgaggacaaggaaaacgatggagactctttgccaacgtttaaatgtgtgtcaggacaaaatactaacacattatgaaaatgatagtacagacctacgtgaccatatagactattggaaacaaatgcgcctagaatgtgctatttattacaaggccagagaaatgggatttaaacatattaaccaccaggtggtgccaacactggctgtatcaaagaataaagcattacaagcaattgaactgcaactaacgttagaaacaatatataactcacaatatagtaatgaaaagtggacattacaagatgttagccttgaagtgtatttaactgcaccaacaggatgtataaaaaaacatggatatacagtggaagtgcagtttgatggagacatatgcaatacaatgcattatacaaactggaaatatatatatatttgtgaagaaacatcagtaactgtggtagagggtcaagttgactattatggtttatattatgttcatgaaggaatacaaacatattttgtgcagtttaaagatgatgcagaaaaatatagtaaaaataaagtatgggaagttcatgcgggtggtcaggtaatattatgtcctacatctgtgtttagcagcgacgaagtatcctctgctgaaattattaggcagcacttggccaaccactccgccgcgacccataccaaaaccgtcgccttgggcaccaaagaaacacagacgactatccagcgaccaagatcagagccagacaccggaaacccctgccacaccaacaagttgttgcacagagactccgtggacagtgctccaatcctcactgcagttaacagctcacacaaaggacggattaactgtaatagtaacactacacccatagtacatttaaaaggtgatgctaatactttaaaatgtttaagatatagatttaaaaagcattgtaaattgtatacagcagtgtcgtccacatggcattggacaggacataatgtaaaacataaaagtgcaattgttacacttacatatgatagtgaatgtcaacgtgaacaatttttgtctcaagtgaaaataccaaaaactattacagtgtctactggatttatgtctatatgacaaaccttgatactgcatccacaacattactggcgtgctttttgctttgcttttgtgtgcttttgtgtgtctgcctattaatacgtccgctgcttttgtctgtgtctacatacacatcattaatactattggtattattattgtggataacagcagcctctgcgtttaggtgttttattgtatatattgtatttgtttatataccattatttttaatacatacacatgcacgcttcttaattacataatgtatatgtacataatgtaattgttacatataattgttgtataccatcacttactgatttttcttttttatttttatatatatagttttttttcttatttgtttgttttttaataaactgttattacgtaacaatgcgacacaaacgttctgcaaaacgcacaaaacgtgcatcggccacccaactttataaaacatgcaaacaggcaggtacatgtccacctgacattatacctaaggttgaaggcaaaactattgctgatcaaatattacaatatggaagtatgggtgtattttttggtgggttaggaattggaacagggtctggtacaggcgggcgcactgggtatattccattaggaacaaggcctcccacagctacagatacacttgctcctgtaagaccccctttaacagtagatcctgtgggcccttctgatccgtctatagtttctttagtggaagaaactagttttattgatgctggtgcaccaacacctgtaccttccattcccccagatgtatcaggatttagtattacaacttcaactgataccacacctgctatattagatattaataatactgttactactgttactacacataataatcccacttttactgacccatctgtattgcagcctccaacacctgcagaaactggagggcattttacactttcatcatccgctattagtacacataattatgaaaaaattcctatggatacatttattgttagcacaaatcctaacacagtaactagtagcacacccataccggggtctcgcccagtggcacgcctaggattatatagtcgcacaacacaacaagttaaagttgtagaccctgcttttgtgaccactcccactaaacttattacatatgataatcctgcatatgaaggtatagatgtggataatacattatattttcctagtaatgataatagtattaatatagctccagatcctgactttttggatatagttgctttacataggccagcattaacctctaggcgtactggcattagatacagtagaattggtaataaacaaacactacgtactcgtagtggaaaatctataggtgctaaggtacattattattatgatttaagtactattaatcctgcagaagaaatagaattgcaaactataacaccttctacatatactaccacttcacatgcagcctcacccacttctattaataatggattatatgatatttatgcagatgactttattacagatacttttacaaccccagtaccatctataccctctacatccttatcaggttatattcctgcaaatacaacaattccttttggtggtgcatacaatattcctttagtatcaggtcctgatatacctattaatacaactgaccaaactccttcattaattcctatagttccagggtctccacaatatacaattattgctaatggaggtgacttttatttacatcctagttattacatgttacgaaaacgacgtaaacgtttaccatattttttttcagatgtctctttggctgcctagtgaggccactgtctacttgcctcctgtcccagtatctaaagttgtaagcacggatgaatatgttgcacgcacaaacatatattatcatgcaggaacatccagactacttgcagttggacatccctattttcctattaaaaaacctaacaataacaaaatattagttcctaaagtatcaggattacaatacagggtatttagaatatatttacctgaccccaataagtttggttttcctgacacctcattttacaatccagatacacagcggctggtttgggcctgtgtaggtgttgaggtaggtcgtggtcagccattaggtgtgggcattagtggccatcctttattaaataaattggatgacacagaaaatgctagtgcttatgcagcaaatgcaggtgtggataatagagaatgtatatctatggattacaaacaaacacaattgtgtttaattggttgcaaaccacctataggggaacactggggcaaaggatccccatgtaacaatgttgcagtaagtccaggtgattgtccaccattagagttaataaacacagttattcaggatggtgatatggttgataccggctttggtgctatggactttactacattacaggctaacaaaagtgaagttccactggatatttgtacgtctatttgcaaatatccagattatattaaaatggtgtcagaaccatatggcgacagcttatttttttatttacgaagggaacaaatgtttgttagacatttatttaatagggctggtgctgttggtgaaaatgtaccagacgatttatacattaaaggctctgggcctactgcaaatttagccagttcaaattattttcctacacctagtggttctatggttacctctgatgcccaaatatttaataaaccttattggttacaacgagcacagggccacaataatggcatttgttggggtaaccaactatttgttactgttgttgatactacacgcagtacaaatatgtcattatgtgctgccatatctacttcagaacctacatataaaaatactaactttaaagagtacctacgacatggggaggaatatgatttacagtttatttttcaactgtgcaaaataaccttaactgcagacgttatgacatacatacattctatgaattctactattttggaggactggaattttggtttacaacctcctccaggaggcacactagaagatacttataggtttgtaacatcccaggcaattgcttgtcaaaaacatacacctccagcacctaaagaagatccccttaaaaaatatactttttgggaagtaaatttaaaagaaaagttttctgcagacctagatcagtttcctttaggacgcaaatttttactacaagcaggatttaaggccaaaccaaaatttacattaggaaaacgaaaagctacacccaccacctcatctacctctacaactgctaaacgcaaaaaacgtaagctgtaagtattgtatgtatgttgaattagtgttgtttgttgtttatatgtttgtatgtgcttgtatgtgcttgtaaatattacgttgtatgtgtgtttgtatgtatggtataataaacacgtgtgtatgtgtttttaaatgcttgtgtaactattgtgtcatgcaacataaataaacttattgtttcaacacctactaattgtgttgtggttattcattgtatataaactatatttgctacatcctgtttttgttttatatatactatattttgtagcgccagcggccattttgtagcttcaaccgaattcggttgcatgctttttggcacaaactgtatttttttaaatagttctatgtcagcaactatagtttaaacttgtacgtttcctgcttgccatgcgtgccaaatccctgttttcctgacctgcactgcttgccaaccattccattgttttttacactgcactatgtgcaactactgaatcactatgtacattgtgtcatataaaataaattactatgcgccaacgccttgaataccgctgttaggcacatatttttggcttgttttaactaacctaattgcatatttggcataaggtttaaacttttaaggccaactaaatgtcaccttagttcatacatgaactgtgtaaaggttagtcatacattattcatttttacaactgcacatgggtgtgtgcaaaccgttttgggttacacatttacaagcaacttatataataatactaaactacaataattcatgtataaaactaagggtgtaaccgaaatcggttgaaccgaaaccggttagtataaaagcagacattttatgcaccaaaagagaactgcaatgtttcaggacccacaggagcgacccagaaagttaccagatttatgcacagagctgcaaacaactatacatgatataatattagaatgtgtgtactgcaagcaacagttactgcgacgtgaggtatatgactttgcttttcgggatttatgcatagtatatagagatgggaatccatatgcagtgtgtgataaatgtttaaagttttattctaaaattagtgagtatagatattattgttatagtttgtatggaacaacattagaacagcaatacaacaaaccgttgtgtgatttgttaattaggtgtattaactgtcaaaagccactgtgtcctgaagaaaagcaaagacatctggacaaaaagcaaagattccataatataaggggtcggtggaccggtcgatgtatgtcttgttgcagatcatcaagaacacgtagagaaacccagctgtaatcatgcatggagatacacctacattgcatgaatatatgttagatttgcaaccagagacaactgatctctactgttatgagcaattaaatgacagctcagaggaggaggatgaaatagatggtccagctggacaagcagaaccggacagagcccattacaatattgtaaccttttgttgcaagtgtgactctacgcttcggttgtgcgtacaaagcacacacgtagacatccgtacgttggaagacctgttaatgggcacactaggaattgtgtgccccatctgttctcagaaaccataatctacc

SEQ ID NO: 119 - DNA, 7885 bp, Human papillomavirus
  source 1..7885: mol_type = genomic DNA; note = sublineage D1; serotype = HPV16
atggctgatcctgcaggtaccaatggggaagagggtacgggatgtaatggatggttctatgtagaggctgtagtggaaaaaaaaacaggggatgctatatcagatgacgagaacgaaaatgacagtgatacaggtgaagatttggtagattttatagtaaatgataatgattatttaacacaggcagaaacagagacagcacatgcgttgtttactgcacaggaagcaaaagaacatagagatgcagtacaggttctaaaacgaaagtatttgggtagtccacttagtgatattagtgaatgtgtagacaataatattagtcctagattaaaagccatatgtatagaaaaacaaagcagagctgcaaaaaggagattatttgaaagcgaagacagcgggtatggcaatactgaagtggaaactcagcagatgttacaggtagaagggcgccatgagactgaaacaccatgtagtcagtatagtggtggaagtgggggtggtagcagtcagtatagtagtggaagtgggggagagggtgttagtgaaagacacactatatgcgaaacaccacttacaaatattttaaatgtactaaaaactagtaatgcaaaggcagcaatgctagcaaaatttaaagagttatacggggtgagttttacagaattagtaagaccatttaaaagtaataaatcaacgtgttgcgattggtgtattgctgcatttggacttacacccagtatagctgacagtataaaaacattattacaacaatattgtttatatttacacattcaaagtttagcgtgttcatggggaatggttgtgttactattagtaagatataaatgtggaaaaaatagagaaacaattgaaaaattgatgtctaaactattatgtgtgtctccaatgtgtatgatgatagagcctccaaaattgcgtagtacagcagcagcattatattggtataaaacaggtatgtcaaatattagtgaagtgtatggagacacgccagaatggatacaaagacaaacagtattacaacatagttttaatgattgtacatttgaattatcacagatggtacaatgggcctacgataatgacatagtagacgatagtgaaattgcatataaatatgcacaattggcagacactaatagtaatgcaagtgcctttttaaaaagtaattcacaggcaaaaattgtaaaggattgtgcaacaatgtgtagacattataaacgagcagaaaaaaaacaaatgagtatgagtcaatggataaaatatagatgtgatagggtagatgatggaggtgattggaagcaaattgttatgtttttaaggtatcaaggtgtagactttatgtcatttttaagtgcattaaaaaaattcctgcaaggtatacctaaaaaaaattgcatattattatatggtgcagctaacacaggtaaatcattatttggtatgagtttaatgaaatttttgcaagggtctgtaatatgttttgtaaattctaaaagccatttttggttacaaccattagcagatgccaaaataggtatgttagatgatgctacagtgccctgttggaactacatagatgacaatttaagaaatgcattggatggaaatttagtttctatggatgtaaagcatagaccattggtacaactaaaatgccctccattattaattacatctaacattaatgctggtacagattccaggtggccttatttacataatcgattggtggtgtttacatttccaaatgagtttccatttgacgaaaacggaaatccagtgtatgagcttaatgataagaactggaaatcctttttctcaaggacgtggtccagattaagtttgcacgaggacgaggacaaggaaaacgatggagactctttgccaacgtttaaatgtgtgtcaggacaaaatactaacacattatgaaaatgatagtacagacctacgtgaccatatagactattggaaacaaatgcgcctagaatgtgctatttattacaaggccagagaaatgggatttaaacatattaaccaccaggtggtgccaacactggctgtatcaaagaataaagcattacaagcaattgaactgcaactaacgttagaaacaatatataactcacaatatagtaatgaaaagtggacattacaagacgttagccttgaagtgtatttaactgcaccaacaggatgtataaaaaaacatggatatacagtggaagtgcagtttgatggagacatatgcaatacaatgcattatacaaactggaaatatatatatatttgtgaagaaacatcagtaactgtggtagagggtcaagttgactattatggtatatattatgttcatgaaggaatacaaacatattttgtgcagtttaaagatgatgcagaaaaatatagtaaaaataaagtatgggaagttcatgcgggtggtcaggtaatattatgtcctacatctgtgtttagcagcgacgaagtaccctctgctgaaattattaggcagcacttggccaaccactccaccgcgacccataccaaagccgtcgccttgggcaccaaagaaacacagacgactatccagcgaccaagatcagagccagacaccggaaacccctgccacaccaacaagttgttgcacagagactccgtggacagtgctccaatcctcactgcagttaacagctcacacaaaggacggattaactgtaatagtaacactacacccatagtacatttaaaaggtgatgctaatactttaaaatgtttaagatatagatttaaaaagcattgtaaattgtatacagcagtgtcgtccacatggcattggacaggacataatgtaaaacataaaagtgcaattgttacacttacatatgatagtgaatgtcaacgtgaacaatttttgtctcaagtgaaaataccaaaaactattacagtgtctactggctttatgtctatatgacaaaccttgatactgcatccacaacattactggcgtgctttttgctttgcttttgtgtgcttttgtgtgtctgcctattaatacgtccgctgcttttgtctgtgtctacatacacatcattaatactattggtattattattgtggataacagcagcctctgcatttaggtgttttattgtatatattgtatttgtttatataccattatttttaatacatacacatgcacgcttcttaattacataatgtatatgtacataatgtaattgttacatataattgttgtataccataaattactgattttttttttatttttatttttatttttgttttttaataaactgttattacttaacaatgcgacacaaacgttctgcaaaacgcacaaaacgtgcatcggccacccaactttataaaacatgcaaacaggcaggtacatgtccacctgacattatacctaaggttgaaggcaaaactattgctgatcaaatattacaatatggaagtatgggtgtattttttggtgggttaggaattggaacagggtctggtacaggcggacgcactgggtacattccattaggaacaaggcctcccacagctacagatacacttgctcctgtaagaccccctttaacagtagatcctgtgggcccttctgatccttctatagtttctttagtggaagaaactagtgttattgatgctggtgcaccaacacctgtaccttccattcccccagatgtatcaggatttagtattacaacttcaactgataccacacctgctatattagatattaataatactgttactactgttactacacataataatcccacttttactgacccatctgtattgcagcctccaacacctgcagaaactggagggcattttacactttcatcatccactattagtacacataattatgaagaaattcctatggatacatttattgttagcacaaaccctaacacagtaactagtagcacacccataccggggtctcgcccagtggcacgcctaggattatatagtcgcacaacacaacaagttaaagttgtggaccctgcttttgtaaccgctcccactaaacttattacatatgataatcctgcatatgaaggtatagatgtggataatacattttattttcctagtaatgataatagtattaatatagctcctgatcctgactttttggatatagttgctttacataggccagcattaacctctaggcgtactggcattagatacagtagacttggtaataaacaaacactacgtactcgtagtggaaaatctataggtgctaaggtacattattattatgatttaagtactattaatcctgcagaagaaatagaattacaaactataacaccttctacatatacaaccacttcacatgcagcctcacccacttctattaataatggattatatgatatttatgcagatgactttattacagatactgttacaaccccagtaccagctataccctctacatccttatcaggttatattcctgcaaatacaacaattccttttggtggtgcatacaatattcctttagtatcaggtcctgatatacctattaatacaactgaccaaactccttcattaattcctatagttccggggtctccacaatatacaattattgctgatggaggtgacttttatttacatcctagttattacatgttacgaaaacgacgtaaacgtttaccatattttttttcagatgtctctttggctgcctagtgaggccactgtctacttgcctcctgtcccagtatctaaagttgtaagcacggatgaatatgttgcacgcacaaacatatattatcatgcaggaacatccagactacttgcagttggacatccctattttcctattaaaaaacctaacaataacaaaatattagttcctaaagtatcaggattacaatacagggtatttagaatatatttacctgaccccaataagtttggttttcctgacacctcattttacaatccagatacacagcggctggtttgggcctgtgtaggtgttgaggtaggtcgtggtcagccattaggtgtgggcattagtggccatcctttattaaataaattggatgacacagaaaatgctagtgcttatgcagcaaatgcaggtgtggataatagagaatgtatatctatggattacaaacaaacacaattgtgtttaattggttgcaaaccacctataggggaacactggggcaaaggatccccatgtaacaatgttacagtaaatccaggtgattgtccaccattagagttaataaacacagttattcaggatggtgatatggttgataccggctttggtgctatggactttactacattacaggctaacaaaagtgaagttccactggatatttgtacgtctatttgcaaatatccagattatattaaaatggtgtcagaaccatatggcgacagcttatttttttatttacgaagggaacaaatgtttgttagacatttatttaatagggctggtgctgttggtgaaaatgtaccagacgatttatacattaaaggctctgggtctactgcaaatttagccagttcaaattattttcctacacctagtggttctatggttacctctgatgcccaaatatttaataaaccttattggttacaacgagcacagggccacaataatggcatttgttggggtaaccaactatttgttactgttgttgatactacacgcagtacaaatatgtcattatgtgctgccatatctacttcagaacctacatataaaaatactaactttaaagagtacctacgacatggggaggaatatgatttacagtttatttttcaactgtgcaaaataaccttaactgcagacgttatgacatacatacattctatgaattccactattttggaggactggaattttggtttacaacctcctccaggaggcacactagaagatacttataggtttgtaacatcccaggcaattgcttgtcaaaaacatacacctccagcacctaaagaagatccccttaaaaaatatactttttgggaagtaaatttaaaagaaaagttttctgcagacctagatcattttcctttaggacgcaaatttttactacaagcaggatttaaggccaaaccaaaatttacattaggaaaacgaaaagctacacccaccacctcatctacctctacaactgctaaacgcaaaaaacgtaagctgtaagtattgtatgtatgttgaattagtgttgtttgttgtttatatgtttgtatgtgcttgtatgtgcttgtaactattacgttgtatgtgtgtttgtatgtatggtataataaacacgtgtgtatgtgtttttaaatgcttgtgtaactattgtgtcatgcaacataaataaacttattgtttcaacacctactaattgtgttgtggttattcattgtatataaactatatttgctacatcctgtttttgtgttatatatactatattttgtagcgccagcggccattttgtagcttcaaccgaattcggttgcatgctttttggcacaaactgtatttttttaaatagttctatgtcagcaactatagtttaaacttgtacgtttcctgcttgccatgcgtgccaaatccctgttttcctgacctgcactgcttgccaaccattccattgttttttacactgcactatgtgcaactactgaatcactatgtacattgtgtcatataaaataaattactatgcgccaacgccttaaataccgctgttaggcacatatttttggcttgttttaactcacctaattgcatatttggcataaggtttaaacttttaaggccaactaaatgtcaccttagttcatacatgaactgtgtaaaggttagtcatacattgttcatttttaaaactgcacatgggtgtgtgcaaaccgttttgggttacacatttacaagcaacttatataataatactaaactacaataattcatgtataaaactaagggcgtaaccgaaatcggttgaaccgaaaccggttagtataaaagcagacattttatgcaccaaaagagaactgcaatgtttcaggacccacaggagcgacccagaaagttaccacatttatgcacagagctgcaaacaactatacatgatataatattagaatgtgtgtactgcaagcaacagttactgcgacgtgaggtatatgactttgcttttcgggatttatgcatagtatatagagatgggaatccatatgcagtgtgtgataaatgtttaaagttttattctaaaattagtgagtatagatattattgttatagtgtgtatggaacaacattagaacagcaatacaacaaaccgttgtgtgatttgttaattaggtgtattaactgtcaaaagccactgtgtcctgaagaaaagcaaagacatctggacaaaaagcaaagattccataatataaggggtcggtggaccggtcgatgtatgtcttgttgcagatcatcaagaacacgtagagaaacccagctgtaatcatgcatggagatacacctacattgcatgaatatatgttagatttgcaaccagagacaactgatctctactgttatgagcaattaaatgacagctcagaggaggaggatgaaatagatggtccagctggacaagcagaaccggacagagcccattacaatattgtaaccttttgttgcaagtgtgactctacgcttcggttgtgcgtacaaagcacacacgtagacatccgtacgttggaagacctgttaatgggcacactaggaattgtgtgccccatctgttctcagaaaccataatctacc

SEQ ID NO: 120 - DNA, 7906 bp, Human papillomavirus
  source 1..7906: mol_type = genomic DNA; note = sublineage D2; serotype = HPV16
atggctgatcctgcaggtaccaatggggaagagggtacgggatgtaatggatggttctatgtagaggctgtagtggaaaaaaaaacaggggatgctatatcagatgacgagaacgaaaatgacagtgatacaggtgaagatctggtagattttatagtaaatgataatgattatttgacacaggcagaaacagagacagcacatgcgttgtttactgcacaggaagcaaaagaacatagagatgcagtacaggttctaaaacgaaagtatttgggtagtccacttagtgatattagtgaatgtgtagacaataatattagtcctagattaaaagccatatgtatagaaaaacaaagtagagctgcaaaaaggagattatttgaaagcgaagacagcgggtatggcaatactgaagtggaaactcagcagatgttacaggtagaagggcgccatgagactgaaacaccatgtagtcagtatagtggtggaagtgggggtggtagcagtcagtatagtagtggaagtgggggagagggtgttagtgaaagacacactatatgcgaaacaccacttacaaatattttaaatgtactaaaaactagtaatgcaaaggcagcaatgctagcaaaatttaaagagttatacggggtgagttttacagaattagtaagaccatttaaaagtaataaatcaacgtgttgcgattggtgtattgctgcatttggacttacacccagtatagctgacagtataaaaacattattacaacaatattgtttatatttacacattcaaagtttagcgtgttcatggggaatggttgtgttactattagtaagatataaatgtggaaaaaatagagaaacaattgaaaaattgatgtctaaactattatgtgtgtctccaatgtgtatgatgatagagcctccaaaattgcgtagtacagcagcagcattatattggtataaaacaggtatgtcaaatattagtgaagtgtgtggagacacgccagaatggatacaaagacaaacagtattacaacatagttttaatgattgtacatttgaattatcacagatggtacaatgggcctacgataatgacatagtagacgatagtgaaattgcatataaatatgcacaattggcagacactaatagtaatgcaagtgcctttttaaaaagtaattcacaggcaaaaattgtaaaggattgtgcaacaatgtgtagacattataaacgagcagaaaaaaaacaaatgagtatgagtcaatggataaaatatagatgtgatagggtagatgatggaggtgattggaagcaaattgttatgtttttaaggtatcaaggtgtagactttatgtcatttttaagtgcattaaaaaaatttctgcaaggtatacctaaaaaaaattgcatattattatatggtgcagctaacacaggtaaatcattatttggtatgagtttaatgaaattcttgcaagggtctgtaatatgttttgtaaattccaaaagccatttttggttacaaccattagcagatgccaaaataggtatgttagatgatgctacagtgccctgttggaactacatagatgacaatttaagaaatgcattggatggaaatttagtttctatggatgtaaagcatagaccattggtacaactaaaatgccctccattattaattacatctaacattaatgctggtacagattccaggtggccttatttacataatcgattggtggtgtttacatttccaaatgagtttccatttgacaaaaacggaaatccagtgtatgagcttaatgataagaactggaaatcctttttctcaaggacgtggtccagattaagtttgcacgaggacgaggacaaggaaaacgatggagactctttgccaacgtttaaatgtgtgtcaggacaaaatactaacacattatgaaaatgatagtacagacctacgtgaccatatagactattggaaacaaatgcgcctagaatgtgctatttattacaaggccagagaaatgggatttaaacatattaaccaccaggtggtgccaacactggctgtatcaaagaataaagcattacaagcaattgaactgcaactaacgttagaaacaatatataactcacaatatagtaatgaaaagtggacattacaagacgttagccttgaagtgtatttaactgcaccaacaggatgtataaaaaaacatggatatacagtggaagtgcagtttgatggagacatatgcaatacaatgcattatacaaactggaaatatatatatatttgtgaagaaacatcagtaactgtggtagagggtcaagttgactattatggtatgtattatgttcatgaaggcatacaaacatattttgtgcagtttaaagatgatgcagaaaaatatagtaaaaataaagtatgggaagttcatgcgggtggtcaggtaatattatgtcctacatctgtgtttagcagcgacgaagtatcctctgctgaaattattaggcagcacttggccaaccactccgccacgacccataccaaagccgtcgccttgggcaccaaagaaacacagacgactatccagcgaccaagatcagagccagacaccggaaacccctgccacaccaacaagttgttgcacagagactccgtggacagtgctccaatcctcactgcagttaacagctcacacaaaggacggattaactgtaatagtaacactacacccatagtacatttaaaaggtgatgctaatactttaaaatgtttaagatatagatttaaaaagcattgtaaattgtatacagcagtgtcgtccacatggcattggacaggacataatgtaaaacataaaagtgcaattgttacacttacatatgatagtgaatgtcaacgtgaacaatttttgtctcaagtgaaaataccaaaaactattacagtgtctactggatttatgtctatatgacaaaccttgatactgcatccacaacattactggcgtgctttttgctttgcttttgtgtgcttttgtgtgtctgcctattaatacgtccgctgcttttgtctgtgtctacatacgcatcattaatactattggtattagtattgtggataacagcagcctctgcatttaggtgttttattgtatatattgtatttgtttatataccattatttttaatacatacacatgcacgcttcttaattacataatgtatatgtacataatgtaattgttacatataattgttgtataccataaattactgattttttttttttatttttattttatatatagttttttttcttatttctgtgtttttgaataaactgttattacttaacaatgcgacacaaacgttctgcaaaacgcacaaaacgtgcatcggccacccaactttataaaacatgcaaacaggcaggtacatgtccacctgacattatacctaaggttgaaggcaaaactattgctgatcaaatattacaatatggaagtatgggtgtattttttggtgggttgggaattggaacagggtctggtacaggcggacgcactgggtacattccattaggaacaaggcctcccacagctacagatacacttgctcctgtaagaccccctttaacagtagatcctgtgggcccttctgatccttctatagtttctttagtggaagaaactagttttattgatgctggtgcaccaacacctgtaccttccattcccccagatgtatcaggatttagtattacaacttcaactgataccacacctgctatattagatattaataatactgttactactgttactacacataataatcccacttttactgacccatctgtattgcagcctccaacacctgcagaaactggagggcattttacactttcatcatccactattagtacacataattatgaagaaattcctatggatacatttattgttagcacaaaccctaacacagtaactagtagcacacccataccggggtctcgcccagtggcacgcctaggattatatagtcgcacaacacaacaagttaaggttgtggaccctgcttttgtaaccgctcccactaaacttattacatatgataatcctgcatatgaaggtatagatgtggataatacattttattttcctagtaatgataatagtattaatatagctccagatcctgactttttggatatagttgctttacataggccagcattaacctctaggcgtactggcattagatacagtagaattggtaataaacaaacactacgtactcgtagtggaaaatctataggtgctaaggtacattattattatgatttaagtactattaatcctgcagaagaaatagaattacaaactataacaccttctacatatacacccacttcacatgcagcctcacccacttctattaataatggattatatgatatttatgcagatgactttattacagatactgttacaaccccagtaccagctataccctctacatccttatcaggttatattcctgcaaatacaacaattccttttggtggggcatacaatattcctttagtatcaggtcctgatatacctattaatacaactgaccaaactccttcattaattcctatagttccagggtctccacaatatacaattattgctgatggaggtgacttttatttacatcctagttattacatgttacgaaaacgacgtaaacgtttaccatattttttttcagatgtctctttggctgcctagtgaggccactgtctacttgcctcctgtcccagtatctaaagttgtaagcacggatgaatatgttgcacgcacaaacatatattatcatgcaggaacatccagactacttgcagttggacatccctattttcctattaaaaaacctaacaataacaaaatattagttcctaaagtatcaggattacaatacagggtatttagaatatatttacctgaccccaataagtttggttttcctgacacctcattttacaatccagatacacagcggctggtttgggcctgtgtaggtgttgaggtaggtcgtggtcagccattaggtgtgggcattagtggccatcctttattaaataaattggatgacaccgaaaatgctagtgcttatgcagcaaatgcaggtgtggataatagagaatgtatatctatggattacaaacaaacacaattgtgtttaattggttgcaaaccacctataggggaacactggggcaaaggatccccatgtaacaatgttgcagtaactccaggtgattgtccaccattagagttaataaacacagttattcaggatggtgatatggttgataccggctttggtgctatggactttactacattacaggctaacaaaagtgaagttccactggatatttgtacgtctatttgcaaatatccagattatattaaaatggtgtcagaaccatatggcgacagcttatttttttatttacgaagggaacaaatgtttgttagacatttatttaatagggctggtgctgttggtgaaactgtaccagacgatttatacattaaaggctctgggtctactgcaaatttagccagttcaaattattttcctacacctagtggttctatggttacctctgatgcccaaatatttaataaaccttattggttacaacgagcacagggccacaataatggcatttgttggggtaaccaactatttgttactgttgttgatactacacgcagtacaaatatgtcattatgtgctgccatatctacttcagaacctacatataaaaatactaactttaaagagtacctacgacatggggaggaatatgatttacagtttatttttcaactgtgcaaaataaccttaactgcagacgttatgacatacatacattctatgaattccactattttggaggactggaattttggtttacaaccccctccaggaggcacactagaagatacttataggtttgtaacatcccaggcaattgcttgtcaaaaacatacacctccagcacctaaagaagatccccttaaaaaatatactttttgggaagtaaatttaaaagaaaagttttctgcagacctagatcagtttcctttaggacgcaaatttttactacaagcaggatttaaggccaaaccaaaatttacattaggaaaacgaaaagctacacccaccacctcatctacctctacaactgctaaacgcaaaaaacgtaagctgtaagtattgtatgtatgttgaattagtgttgtttgttgtttatatgtttgtatgtgcttgtatgtgcttgtaaatattacgttgtatgtgtgtttgtatgtatggtataataaacacgtgtgtatgtgtttttaaatgcttgtgtaactattgtgtcatgcaacataaataaacttattgtttcatcacctactaattgtgttgtggttattcattgtatataaactatatttgctacattttgtttttgttttatatatactatattttgtagcgccagcggccattttgtagcttcaaccgaattcggttgcatgctttttggcacaaactgtatttttttaaatagttctgtgtcagcaactatagtttaaacttgtacgtttcctgcttgccatgcgtgccaaatccctgttttcctgacctgcactgcttgccaaccattccattgttttttacactgcactatgtgcaactactgaatcactatgtacattgtgtcatataaaataaatcactatgcgccaacgccttaaataccgctgttaggcacatatttttggcttgttttaactcacctaattgcatatttggcataaggtttaaacttttaaggccaactaaatgtcaccttagttcatacatgaactgtgtaaaggttagtcatacattgttcatttgtaaaactgcacatggtgtgtgcaaaccgttttgggttacacatttacaaggaacttatataataatactaaactacaataattcatgtataaaactaagggcgtaaccgaaatcggttgaaccgaaaccggttagtataaaagcagacattttatgcaccaaaagagaactgcaatgtttcaggacccacaggagcgacccagaaagttaccacatttatgcacagagctgcaaacaactatacatgatataatattagaatgtgtgtactgcaagcaacagttactgcgacgtgaggtatatgactttgcttttcgggatttatgcatagtatatagagatgggaatccatatgcagtgtgtgataaatgtttaaagttttattctaaaattagtgagtatagatattattgttatagtgtgtatggaacaacattagaacagcaatacaacaaaccgttgtgtgatttgttaattaggtgtattaactgtcaaaagccactgtgtcctgaagaaaagcaaagacatctggacaaaaagcaaagattccataatataaggggtcggtggaccggtcgatgtatgtcttgttgcagatcatcgagaacacgtagagaaacccagctgtaatcatgcatggagatacacctacattgcatgaatatatgttagatttgcaaccagagacaactgatctctactgttatgagcaattaaatgacagctcagaggaggaggatgaaatagatggtccagctggacaagcagaaccggacagagcccattacaatattgtaaccttctgttgcaagtgtgactctacgcttcggttgtgcgtacaaagcacacacgtagacatccgtacgttggaagacctgttaatgggcacactaggaattgtgtgccccatctgttctcagaaaccataatctacc

SEQ ID NO: 121 - DNA, 7906 bp, Human papillomavirus
  source 1..7906: mol_type = genomic DNA; note = sublineage D3; serotype = HPV16
atggctgatcctgcaggtaccaatggggaagagggtacgggatgtaatggatggttctatgtagaggctgtagtggaaaaaaaaacaggggatgccatatcagatgacgagaacgaaaatgacagtgatacaggtgaagatttggtagattttatagtaaatgataatgattatttgacacaggcagaaacagagacagcacatgcgttgtttactgcacaggaagcaaaagaacatagagatgcagtacaggttctaaaacgaaagtatttgggtagtccacttagtgatattagtgaatgtgtagacaataatattagtcctagattaaaagccatatgtatagaaaaacaaagtagagctgcaaaaaggagattatttgaaagcgaagacagcgggtatggcaatactgaagtggaaactcagcagatgttacaggtagaagggcgccatgagactgaaacaccatgtagtcagtatagtggtggaagtgggggtggtagcagtcagtatagtagtggaagtgggggagagggtgttagtgaaagacacactatatgcgaaacaccacttacaaatattttaaatgtactaaaaactagtaatgcaaaggcagcaatgctagcaaaatttaaagagttatacggggtgagttttacagaattagtaagaccatttaaaagtaataaatcaacgtgttgcgattggtgtattgctgcattcggacttacacccagtatagctgacagtataaaaacattattacaacaatattgtttatatttacacattcaaagtttagcgtgttcatggggaatggttgtgttactattagtaagatataaatgtggaaaaaatagagaaacaattgaaaaattgatgtctaaactattatgtgtgtctccaatgtgtatgatgatagagcctccaaaattgcgtagtacagcagcagcattatattggtataaaacaggtatgtcaaatattagtgcagtgtatggagacacgccagaatggatacaaagacaaacagtattacaacatagttttaatgattgtacatttgaattatcacagatggtacaatgggcctacgataatgacatagtagacgatagtgaaattgcatataaatatgcacaattggcagacactaatagtaatgcaagtgcctttttaaaaggtaattcacaggcaaaaattgtaaaggattgtgcaacaatgtgtagacattataaacgagcagaaaaaaaacaaatgagtatgagtcaatggataaaatatagatgtgatagggtagatgatggaggtgattggaagcaaattgttatgtttttaaggtatcaaggtgtagactttatgtcatttttaagtgcattaaaaaaatttctgcaaggtatacctaaaaaaaattgcatattattatatggtgcagctaacacaggtaaatcattatttggtatgagtttaatgaaattcttgcaagggtctgtaatatgttttgtaaattctaaaagccatttttggttacaaccattagcagatgccaaaataggtatgttagatgatgctacagtgccctgttggaactacatagatgacaatttaagaaatgcattggatggaaatttagtttctatggatgtaaagcatagaccattggtacaactaaaatgccctccattattaattacatctaacattaatgctggtacagattccaggtggccttatttacataatcgattggtggtgtttacatttccaaatgagtttccatttgacaaaaacggaaatccagtgtatgagcttaatgataagaactggaaatcctttttctcaaggacgtggtccagattaagtttgcacgaggacgaggacaaggaaaacgatggagactctttgccaacgtttaaatgtgtgtcaggacaaaatactaacacattatgaaaatgatagtacagacctacgtgaccatatagactattggaaacaaatgcgcctagaatgtgctatttattacaaggccagagaaatgggatttaaacatattaaccaccaggtggtgccaacactggctgtatcaaagaataaagcattacaagcaattgaactgcaactaacgttagaaacaatatataactcacaatatagtaatgaaaagtggacattacaagacgttagccttgaagtgtatttaactgcaccaacaggatgtataaaaaaacatggatatacagtggaagtgcagtttgatggagacatatgcaatacaatgcattatacaaactggaagcatatatatatttgtgaagacacatcagtaactgtggtagagggtcaagttgactattatggtatatattatgttcatgaaggaatacaaacatattttgtgcagtttaaagatgatgcagaaaaatatagtaaaaataaagtatgggaagttcatgcgggtggtcaggtaatattatgtcctacatctgtgtttagcagcgacgaagtatcctctgctgaaattactaggcagcacttggccaaccactccgccgcgacccataccaaagccgtcgccttgggcaccaaagaaacacagacgactatccagcgaccaagatcagagccagacaccggaaacccctgccacaccaacaagttgttgcacagagactccgtggacagtgctccaatcctcactgcagttaacagctcacacaaaggacggattaactgtaatagtaacactacacccatagtacatttaaaaggtgatgctaatactttaaaatgtttaagatacagatttaaaaagcattgtaaattgtatacagcagtgtcgtccacatggcattggacaggacataatgtaaaacataaaagtgcaattgttacacttacatatgatagtgaatgtcaacgtgaacaatttttgtctcaagtgaaaataccaaaaactattacagtgtctactggatttatgtctatatgacaaaccttgatactgcatccacaacattactggcgtgctttttgctttgcttttgtgtgcttttgtgtgtctgcctattaatacgtccgctgcttttgtctgtgtctacatacacatcattaatactattggtattagtattgtggataacagcagcctctgcatttaggtgttttattgtatatattgtatttgtttatataccattatttttaatacatacacatgcacgcttcttaattacataatgtatatgtacataatgtaattgttacatataattgttgtataccataaattactgatttttttttttatttttattttatatatagttttttttcttatttgtgtgttttttaataaactgttattacttaacaatgcgacacaaacgttctgcaaaacgcacaaaacgtgcatcggccacccaactttataaaacatgcaaacaggcaggtacatgtccacctgacattatacctaaggttgaaggcaaaactattgctgatcaaatattacaatatggaagtatgggtgtattttttggtgggttaggaattggaacagggtctggtacaggcggacgcactgggtacattccattaggaacaaggcctcccacagctacggatacacttgctcctgtaagaccccctttaacagtagatcctgtgggcccttctgatccttctatagtttctttagtggaagaaactagttttattgatgctggtgcaccaacccctgtaccttccattcccccagatgtatcaggatttagtattacaacttcaactgataccacacctgctatattagatattaataatactgttactactgttactacacataataatcccacttttactgacccatctgtattgcagcctccaacacctgcagaaactggagggcattttacactttcatcatccactattagtacacataattatgaagaaattcctatggatacatttattgttagcacaaaccctaacacagtaactagtagcacacccataccggggtctcgcccagtggcacgcctaggattatatagtcgcacaacacaacaagttaaggttgtggaccctgcttttgtaaccgctcccactaaacttattacatatgataatcctgcatatgaaggtatagatgtggataatacattttattttcctagtaatgataatagtattaatatagctccagatcctgactttttggatatagttgctttacataggccagcattaacctctaggcgtactggcattagatacagtagaattggtaataaacaaacactacgtactcgtagtggaaaatctataggtgctaaggtacattattattatgatttaagtactattaatcctgcagaagaaatagaattacaaactataacaccttctacatatacaaccacttcccatgcagcctcaccaacttctattaataatggattatatgatatttatgcagatgactttattacagatactgttacaaccccagtaccagctataccctctacatccttatcaggttatattcctgcaaatacaacaattccttttggtggtgcatacaatattcctttagtatcaggacctgatatacctattaatacaactgaccaaactccttcattaattcctatagttccagggtctccacaatatacaattattgctgatggaggtgacttttatttacatcctagttattacatgttacgaaaacgacgtaaacgtttaccatattttttttcagatgtctctttggctgcctagtgaggccactgtctacttgcctcctgtcccagtatctaaagttgtaagcacggatgaatatgttgcacgcacaaacatatattatcatgcaggaacatccagactacttgcagttggacatccctattttcctattaaaaaacctaacaataacaaaatattagttcctaaagtatcaggattacaatacagggtatttagaatatatttacctgaccccaataagtttggttttcctgacacctcattttacaatccagatacacagcggctggtttgggcctgtgtaggtgttgaggtaggtcgtggtcagccattaggtgtgggcattagtggccatcctttattaaataaattggatgacacagaaaatgctagtgcttatgcagcaaatgcaggtgtggataatagagaatgtatatctatggattacaaacaaacacaattgtgtttaattggttgcaaaccacctataggggaacactggggcaaaggatccccatgtaacaatgttgcagtaactccaggtgattgtccaccattagagttaataaacacagttattcaggatggtgatatggttgataccggctttggtgctatggactttactacattacaggctaacaaaagtgaagttccactggatatttgtacatctatttgcaaatatccagattatattaaaatggtgtcagaaccatatggcgacagcctatttttttatttacgaagggaacaaatgtttgttagacatttatttaatagggctggtgctgttggtgaaaatgtaccagacgatttatacattaaaggctctgggtctactgcaaatttagccagttcaaattattttcctacacctagtggttctatggttacctctgatgcccaaatatttaataaaccttattggttacaacgagcacagggccacaataatggcatttgttggggtaaccaactatttgttactgttgttgatactacacgcagtacaaatatgtcattatgtgctgccatatctacttcagaacctacatataaaaatactaactttaaagagtacctacgacatggggaggaatatgatttacagtttatttttcaactgtgcaaaataaccttaactgcagacgttatgtcatacatacattctatgaattccactattttggaggactggaattttggtttacaacctcctccaggaggcacactagaagatacttataggtttgtaacatcccaggcaattgcttgtcaaaaacatacacctccagcacctaaagaagatccccttaaaaaatatactttttgggaagtaaatttaaaagaaaagttttctgcagacctagatcagtttcctttaggacgcaaatttttactacaagcaggatttaaggccaaaccaaaatttacattaggaaaacgaaaagctacacccaccacctcatctacctctacaactgctaaacgcaaaaaacgtaagctgtaagtattgtatgtatgttgaattagtgttgtttgttgtttatatgtttgtatgtgcttgtatgtgcttgtaaatattacgttgtatgtgtgtttgtatgtatggtataataaacacgtgtgtatgtgtttttaaatgcttgtgtaactattgtgtcatgcaacataaataaacttattgtttcatcacctactaattgtgttgtggttattcattgtatataaactatatttgctacattttgtttttgttttatatatactatattttgtagcgccagcggccattttgtagcttcaaccgaattcggttgcatgctttttggcacaaactgtatttttttaaatagttctatgtcagcaactatagtttaaacttgtacgtttcctgcttgccatgcgtgccaaatccctgttttcctgacctgcactgcttgccaaccattccattgttttttacactgcactatgtgcaactactgaatcactatgtacattgtgtcatataaaataaattactatgcgccaacgccttaaataccgctgttaggcacatatttttggcttgttttaactcacctaattgcatagttggcataaggtttaaacttttaaggccaactaaatgtcaccttagttcatacatgaactgtgtaaaggttagtcatacattgttcatttgtaaaactgcacatgggtgtgtgcaaaccgttttgggttacacatttacaagaaacttatataataatactaaactacaataattcatgtataaaactaagggcgtaaccgaaatcggttgaaccgaaaccggttagtataaaagcagacattttatgcaccaaaagagaactgcaatgtttcaggacccacaggagcgacccagaaagttaccacatttatgcacagagctgcaaacaactatacatgatataatattagaatgtgtgtactgcaagcaacagttactgcgacgtgaggtatatgactttgcttttcgggatttatgcatagtatatagagatgggaatccatatgcagtgtgtgataaatgtttaaagttttattctaaaattagtgagtatagatattattgttatagtgtgtatggaacaacattagaacagcaatacaacaaaccgttgtgtgatttgttaattaggtgtattaactgtcaaaagccactatgtcctgaagaaaagcaaagacatctggacaaaaagcaaagattccataatataaggggtcggtggaccggtcgatgtatgtcttgttgcagatcatcgagaacacgtagagaaacccagctgtaatcatgcatggagatacacctacattgcatgaatatatgttagatttgcaaccagagacaactgatctctactgttatgagcaattaaatgacagctcagaggaggaggatgaaatagatggtccagctggacaagcagaaccggacagagcccattacaatattgtaaccttctgttgcaagtgtgactctacgcttcggttgtgcgtacaaagcacacacgtagacatccgtacgttggaagacctgttaatgggcacactaggaattgtgtgccccatctgttctcagaaaccataatctacc

SEQ ID NO: 122 - DNA, 7909 bp, Human papillomavirus
  source 1..7909: mol_type = genomic DNA; note = sublineage D4; serotype = HPV16
atggctgatcctgcaggtaccaatggggaagagggtacgggatgtaatggatggttttatgtagaggctgtagtggaaaaaaaaacaggggatgctatatcagatgacgagaacgaaaatgacagtgatacaggtgaagatttggtagattttatagtaaatgataatgattatttaacacaggcagaaacagagacagcacatgcgttgtttactgcacaggaagcaaaagaacatagagatgcagtacaggttctaaaacgaaagtatttgggtagtccacttagtgatattagtgaatgtgtagacaataatattagtcctagattaaaagccatatgtatagaaaaacaaagtagagctgcaaaaaggagattatttgaaagcgaagacagcgggtatggcaatactgaagtggaaactcagcagatgttacaggtagaagggcgccatgagactgaaacaccatgtagtcagtatagtggtggaagtgggggtggtagcagtcagtatagtagtggaagtgggggagagggtgttagtgaaagacacactatatgcgaaacaccacttacaaatattttaaatgtactaaaaactagtaatgcaaaggcagcaatgctagcaaaatttaaagagttatacggggtgagttttacagaattagtaagaccatttaaaagtaataaatcaacgtgttgcgattggtgtattgctgcatttggacttacacccagtatagctgacagtataaaaacattattacaacaatattgtttatatttacacattcaaagtttagcgtgttcatggggaatggttgtgttactattagtaagatataaatgtggaaaaaatagagaaacaattgaaaaattgatgtctaaactattatgtgtgtctccaatgtgtatgatgatagagcctccaaaattgcgtagtacagcagcagcattatattggtataaaacaggtatgtcaaatattagtgaagtgtatggagacacgccagaatggatacaaagacaaacagtattacaacatagttttaatgattgtacatttgaattatcacagatggtacaatgggcctacgataatgacatagtagacgatagtgaaattgcatataaatatgcacaattggcagacactaatagtaatgcaagtgcctttttaaaaagtaattcacaggcaaaaattgtaaaggattgtgcaacaatgtgtagacattataaacgagcagaaaaaaaacaaatgagtatgagtcaatggataaaatatagatgtgatagggtagatgatggaggtgattggaagcaaattgttatgtttttaaggtatcaaggtgtagactttatgtcatttttaagtgcattaaaaaaatttctgcaaggtatacctaaaaaaaattgcatattattatatggtgcagctaacacaggtaaatcattatttggtatgagtttaatgaaatttttgcaagggtctgtaatatgttttgtaaattctaaaagccatttttggttacaaccattagcagatgccaaaataggtatgttagatgatgctacagtgccctgttggaactacatagatgacaatttaagaaatgcattggatggaaatttagtttctatggatgtaaagcatagaccattggtacaactaaaatgccctccattattaattacatctaacattaatgctggtacagattccaggtggccttatttacataatcgattggtggtgtttacatttccaaatgagtttccatttgacgaaaacggaaatccagtgtatgagcttaatgataagaactggaaatcctttttctcaaggacgtggtccagattaagtttgcacgaggacgaggacaaggaaaacgatggagactctttgccaacgtttaaatgtgtgtcaggacaaaatactaacacattatgaaaatgatagtacagacctacgtgaccatatagactattggaaacaaatgcgcctagaatgtgctatttattacaaggccagagaaatgggatttaaacatattaaccaccaggtggtgccaacactggctgtatcaaagaataaagcattacaagcaattgaactgcaactaacgttagaaacaatatataactcacaatatagtaatgaaaagtggacattacaagacgttagccttgaagtgtatttaactgcaccaacaggatgtataaaaaaacatggatatacagtggaagtgcagtttgatggagacatatgcaatacaatgcattatacaaactggagatatatatatatttgtgaagaaacatcagtaactgtggtagagggtcaagttgactattatggtatatattatgttcatgaaggaatacaaacatattttgtgcagtttaaagatgatgcagaaaaatatagtaaaaataaagtatgggaagttcatgcgggtggtcaggtaatattatgtcctacatctgtgtttagcagcgacgaagtatcctctgctgaaattattaggcagcacttggccaaccaccccgccgcgacccataccaaagccgtcgccttgggcaccaaagaaacacagacgactatccagcgaccaagatcagagccagacaccggaaacccctgccacaccaacaagttgttgcacagagactccgtggacagtgctccaatcctcactgcagttaacagctcacacaaaggacggattacctgtaatagtaacactacacccatagtacatttaaaaggtgatgctaatactttaaaatgtttaagatacagatttaaaaagcattgtaaattgtatacagcagtgtcgtccacatggcattggacaggacataatgtaaaacataaaagtgcaattgttacacttacatatgatagtgaatgtcaacgtgaacaatttttgtctcaagtgaaaataccaaaaactattacagtgtctactggatttatgtctatatgacaaaccttgatactgcatccacaacattactggcgtgctttttgctttgcttttgtgtgcttttgtgtgtctgcctattaatacgtccgctgcttttgtctgtgtcaacatacacatcattaatactattggtattattattgtggataacagcagcctctgcatttaggtgttttattgtatatattgtatttgtttatataccattatttttaatacatacacatgcacgcttcgtaattacataatgtatatgtacataatgtaattgttacatataattgttgtataccataaattactgattttttttttttttatttttattttatatatagttttttttcttatttgtttgttttttaataaactgttattacttaacaatgcgacacaaacgttctgcaaaacgcacaaaacgtgcatcggccacccaactttataaaacatgcaaacaggcaggtacatgtccacctgacattatacctaaggttgaaggcaaaactattgctgatcaaatattacaatatggaagtatgggtgtattttttggtgggttaggaattggaacagggtctggtacaggcggacgcactgggtacattccattaggaacaaggcctcccacagctacagatacacttgctcctgtaagaccccctttaacagtagatcctgtgggcccttctgatccttctatagtttctttagtggaagaaactagttttattgatgctggtgcaccaacacctgtaccttccattcccccagatgtatcaggatttagtattacaacttcaactgataccacacctgctatattagatattaataatactgttactactgttactacacataataatcccacttttactgacccatctgtattgcagcctccaacacctgcagaaactggagggcattttacactttcatcatccactattagtacacataattatgaagaaattcctatggatacatttattgttagcacaaaccctaacacagtaactagtagcacacccataccggggtctcgcccagtggcacgcctaggattatatagtcgcacaacacaacaagttaaagttgtggaccctgcttttgtaaccgctcccactaaacttattacatatgataatcctgcatatgaaggtatagatgtggataatacattttattttcctagtaatgataatagtattaatatagctccagatcctgactttttggatatagttgctttacataggccagcattaacctctaggcgtactggcattagatacagtagaattggtaataaacaaacactacgtactcgtagtggaaaatctataggtgctaaggtacattattattatgatttaagtactattaatcctgcagaagaaatagaattacaaactataacaccttctacatatacaaccacttcacatgcagcctcacccacttctattaataatggattatatgatatttatgcagatgactttattacagatactgttacaaccccagtaccagctataccctctacatccttatcaggttatattcctgcaaatacaacaattccttttggtggtgcatacaatattcctttagtatcaggtcctgatatacctattaatacaactgaccaaactccttcattaattcctatagttccagggtctccacaatatacaattattgctgatggaggtgacttttatttacatcctagttattacatgttacgaaaacgacgtaaacgtttaccatattttttttcagatgtctctttggctgcctagtgaggccactgtctacttgcctcctgtcccagtatctaaagttgtaagcacggatgaatatgttgcacgcacaaacatatattatcatgcaggaacatccagactacttgcagttggacatccctattttcctattaaaaaacctaacaataacaaaatattagttcctaaagtatcaggattacaatacagggtatttagaatatatttacctgaccccaataagtttggttttcctgacacctcattttacaatccagatacacagcggctggtttgggcctgtgtaggtgttgaggtaggtcgtggtcagccattaggtgtgggcattagtggccatcctttattaaataaattggatgacacagaaaatgctagtgcttatgcagcaaatgcaggtgtggataatagagaatgtatatctatggattacaaacaaacacaattgtgtttaattggttgcaaaccacctataggggaacactggggcaaaggatccccatgtaacaatgttgcagtaaatccaggtgattgtccaccattagagttaataaacacagttattcaggatggtgatatggttgataccggctttggtgctatggactttactacattacaggctaacaaaagtgaagttccactggatatttgtacgtctatttgcaaatatccagattatattaaaatggtgtcagaaccatatggcgacagcttatttttttatttacgaagggaacaaatgtttgttagacatttatttaatagggctggtgctgttggtgaaaatgtaccagacgatttatacattaaaggctctgggtctactgcaaatttagccagttcaaattattttcctacacctagtggttctatggttacctctgatgcccaaatatttaataaaccttattggttacaacgagcacagggccacaataatggcatttgttggggtaaccaactatttgttactgttgttgatactacacgcagtacaaatatgtcattatgtgctgccatatctacttcagaacctacatataaaaatactaactttaaagagtacctacgacatggggaggaatatgatttacagtttatttttcaactgtgcaaaataaccttaactgcagacgttatgacatacatacattctatgaattccactattttggaggactggaattttggtttacaacctcctccaggaggcacactagaagatacttataggtttgtaacatcccaggcaattgcttgtcaaaaacatacacctccagcacctaaagaagatccccttaaaaaatatactttttgggaagtaaatttaaaagaaaagttttctgcagacctagatcagtttcctttaggacgcaaatttttactacaagcaggatttaaggccaaaccaaaatttacattaggaaaacgaaaagctacacccaccacctcatctacctctacaactgctaaacgcaaaaaacgtaagctgtaagtattgtatgtatgttgaattagtgttgtttgttgtttatatgtttgtatgtgcttgtatgtgcttgtaaatattacgttgtatgtgtgtttgtatgtatggtataataaacacgtgtgtatgtgtttttaaatgcttgtgtaactattgtgtcatgcaacataaataaacttattgtttcaacacctactaattgtgttgtaattattcattgtatataaactatatttgctacatcctgtttttgttttatatatactatattttgtagcgccagcggccatgttgtagcttcaaccgaattcggttgcatgctttttggcacaaactgtatttttttaaatagttctatgtcagcaactatagtttaaacttgtacgtttcctgcttgccatgcgtgccaaatccctgttttcctgacctgcactgcttgccaaccattccattgttttttacactgcactatgtgcaactactgaatcactatgtacattgtgtcatataaaataaattactatgcgccaacgccttaaataccgctgttaggcacatatttttggcttgttttaactcacctaattgcatatttggcataaggtttaaacttttaaggccaactaaatgtcatcttagttcatacatgaactgtgtaaaggttagtcatacattgttcatttttaaaactgcacatgggtgtgtgcaaaccgttttgggttacacatttacaagcaacttatataataatactaaactacaataattcatgtataaaactaagggcgtaaccgaaatcggttgaaccgaaaccggttagtataaaagcagacattttatgcaccaaaagagaactgcaatgtttcaggacccacaggagcgacccagaaagttaccacatttatgcacagagctgcaaacaactatacatgatataatattagaatgtgtgtactgcaagcaacagttactgcgacgtgaggtatatgactttgcttttcgggatttatgcatagtatatagagatgggaatccatatgcagtgtgtgataaatgtttaaagttttattctaaaattagtgagtatagatattattgttatagtgtgtatggaacaacattagaacagcaatacaacaaaccgttgtgtgatttgttaattaggtgtattaactgtcaaaagccactgtgtcctgaagaaaagcaaagacatctggacaaaaagcaaagattccataatataaggggtcggtggaccggtcgatgtatgtcttgttgcagatcatcaagaacacgtagagaaacccagctgtaatcatgcatggagatacacctacattgcatgaatatatgttagatttgcaaccagagacaactgatctctactgttatgagcaattaaatgacagctcagaggaggaggatgaaatagatggtccagctggacaagcagaaccggacagagcccattacaatattgtaaccttttgttgcaagtgtgactctacgcttcggttgtgcgtacaaagcacacacgtagacatccgtacgttggaagacctgttaatgggcacactaggaattgtgtgccccatctgttctcagaaaccataatctacc

SEQ ID NO: 123 - DNA, 7905 bp, Human papillomavirus
  source 1..7905: mol_type = genomic DNA; note = sublineage A3; serotype = HPV16
atggctgatcctgcaggtaccaatggggaagagggtacgggatgtaatggatggttttatgtagaggctgtagtggaaaaaaaaacaggggatgctatatcagatgacgagaacgaaaatgacagtgatacaggtgaagatttggtagattttatagtaaatgataatgattatttaacacaggcagaaacagagacagcacatgcgttgtttactgcacaggaagcaaaacaacatagagatgcagtacaggttctaaaacgaaagtatttgggtagtccacttagtgatattagtggatgtgtagacaataatattagtcctagattaaaagctatatgtatagaaaaacaaagtagagctgcaaaaaggagattatttgaaagcgaagacagcgggtatggcaatactgaagtggaaactcagcagatgttacaggtagaagggcgccatgagactgaaacaccatgtagtcagtatagtggtggaagtgggggtggttgcagtcagtacagtagtggaagtgggggagagggtgttagtgaaagacacactatatgccaaacaccacttacaaatattttaaatgtactaaaaactagtaatgcaaaggcagcaatgttagcaaaatttaaagagttatacggggtgagtttttcagaattagtaagaccatttaaaagtaataaatcaacgtgttgcgattggtgtattgctgcatttggacttacacccagtatagctgacagtataaaaacactattacaacaatattgtttatatttacacattcaaagtttagcatgttcatggggaatggttgtgttactattagtaagatataaatgtggaaaaaatagagaaacaattgaaaaattgctgtctaaactattatgtgtgtctccaatgtgtatgatgatagagcctccaaaattgcgtagtacagcagcagcattatattggtataaaacaggtatatcaaatattagtgaagtgtatggagacacgccagaatggatacaaagacaaacagtattacaacatagttttaatgattgtacatttgacctatcacagatggtacaatgggcctacgataatgacatagtagacgatagtgaaattgcatataaatatgcacaattggcagacactaatagtaatgcaagtgcctttctaaaaagtaattcacaggcaaaaattgtaaaggattgtgcaacaatgtgtagacattataaacgagcagaaaaaaaacaaatgagtatgagtcaatggataaaatatagatgtgatagggtagatgatggaggtgattggaagcaaattgttatgtttttaaggtatcaaggtgtagagtttatgtcatttttaactgcattaaaaagatttttgcaaggcatacctaaaaaaaattgcatattactatatggtgcagccaacacaggtaaatcattatttggtatgagtttaataaaatttctgcaagggtctgtaatatgttttgtaaattcgaaaagccatttttggttacaaccattagcagatgccaaaataggtatgttagatgatgctacagtgccctgttggaactacatagatgacaatttaagaaatgcattggatggaaatttagtttctatggatgtaaagcatagaccattggtacaactaaaatgccctccattattaattacatctaacattaatgctggtacagattctaggtggccgtatttacataatagattggtggtgtttacatttcctaatgagtttccatttgacgaaaacggaaatccagtgtatgagcttaatgataagaactggaaatcctttttctcaaggacgtggtccagattaagtttgcacgaggacgaggacaaggaaaacgatggagactctttgccaacgtttaaatgtgtgtcaggacaaaatactaacacattatgaaaatgatagtacagacctacgtgaccatatagactattggaaacacatgcgcctagaatgtgctatttattacaaggccagagaaatgggatttaaacatattaaccaccaggtggtgccaacactggctgtatcaaagaataaagcattacaagcaattgaactgcaactaacgttagaaacaatatataactcacaatatagtaatgaaaagtggacattacaagacgttagccttgaagtgtatttaactgcaccaacaggatgtataaaaaaacatggatatacagtggaagtgcagtttgatggagacatatgcaatacaatgcattatacaaactggacacatatatatatttgtgaagaagcatcagtaactgtggtagagggtcaagttgactattatggtttatattatgttcatgaaggaatacgaacatattttgtgcagtttaaagatgatgcagaaaaatatagtaaaaataaagtatgggaagttcatgcgggtggtcaggtaatattatgtcctacatctgtgtttagcagcaacgaagtatcctctcctgaaattattaggcagcacttggccaaccactccgccgcgacccataccaaagccgtcgccttgggcaccgaagaaacacagacgactatccagcgaccaagatcagagccagacaccggaaacccctgccacaccactaagttgttgcacagagactcagtggacagtgctccaatcctcactgcatttaacagctcacacaaaggacggattaactgtaatagtaacactacacccatagtacatttaaaaggtgatgctaatactttaaaatgtttaagatatagatttaaaaagcattgtaaattgtatactgcagtgtcgtctacatggcattggacaggacataatgtaaaacataaaagtgcaattgttacacttacatatgatagtgaatggcaacgtgaccaatttttgtctcaagttaaaataccaaaaactattacagtgtctactggatttatgtctatatgacaaatcttgatactgcatccacaacattactggcgtgctttttgctttgcttttgtgtgcttttgtgtgtctgcctattaatacgtccgctgcttttgtctgtgtctacatacacatcattaatactattggtattagtattgtggataacagcagcctctgcgtttaggtgttttattgtatatattgtatttgtttatataccattatttttaatacatacacatgcacgctttttaattacataatgtatatgtacataatgtaattgttacatataattgttgtataccataacttactattttttcttttttatttttatatataattttttttttgtttgtttgtttgttttttaataaactgttataacttaacaatgcgacacaaacgttctgcaaaacgcacaaaacgtgcatcggctacccaactttataaaacatgcaaacaggcaggtacatgtccacctgacattatacctaaggttgaaggcaaaactattgctgatcaaatattacaatatggaagtatgggtgtattttttggtgggttaggaattggaacagggtcgggtacaggcggacgcactgggtatattccattgggaacaaggcctcccacagctacagatacacttgctcctgtaagaccccctttaacagtagatcctgtgggcccttctgatccttctatagtttctttagtggaagaaactagttttattgatgctggtgcaccaacatctgtaccttccattcccccagatgtatcaggatttagtattactacttcaactgataccacacctgctatattagatattaataatactgttactactgttactacacataataatcccactttcactgacccatctgtattgcagcctccaacacctgcagaaactggagggcattttacactttcatcatccactattagtacacataattatgaagaaattcctatggatacatttattgttagcacaaaccctaacacagtaactagtagcacacccataccagggtctcgcccagtggcacgcctaggattatatagtcgcacaacacaacaagttaaagttgtagaccctgcttttgtaaccactcccactaaacttattacatatgataatcctgcatatgaaggtatagatgtggataatacattatattttcctagtaatgataatagtattaatatagctccagatcctgactttttggatatagttgctttacataggccagcattaacctctaggcgtactggcattaggtacagtagaattggtaataaacaaacactacgtactcgtagtggaaaatctataggtgctaaggtacattattattatgatttgagtactattaatcctgcagaagaaatagaattacaaactataacaccttctacatatactaccacttcacatgcagcctcacctacttctattaataatggattatatgatatttatgcagatgactttattacagatacttctacaaccccggtaccatctgtaccctctacatctttatcaggttatattcctgcaaatacaacaattccttttggtggtgcatacaatattcctttagtatcaggtcctgatatacccattaatataactgaccaagctccttcattaattcctatagttccagggtctccacaatatacaattattgctgatgcaggtgacttttatttacatcctagttattacatgttacgaaaacgacgtaaacgtttaccatattttttttcagatgtctctttggctgcctagtgaggccactgtctacttgcctcctgtcccagtatctaaggttgtaagcacggatgaatatgttgcacgcacaaacatatattatcatgcaggaacatccagactacttgcagttggacatccctattttcctattaaaaaacctaacaataacaaaatattagttcctaaagtatcaggattacaatacagggtatttagaatacatttacctgaccccaataagtttggttttcctgacacctcattttataatccagatacacagcggctggtttgggcctgtgtaggtgttgaggtaggtcgtggtcagccattaggtgtgggcattagtggccatcctttattaaataaattggatgacacagaaaatgctagtgcttatgcagcaaatgcaggtgtggataatagagaatgtatatctatggattacaaacaaacacaattgtgtttaattggttgcaaaccacctataggggaacactggggcaaaggatccccatgtaccaatgttgcagtaaatccaggtgattgtccaccattagagttaataaacacagttattcaggatggtgatatggttgatactggctttggtgctatggactttactacattacaggctaacaaaagtgaagttccactggatatttgtacatctatttgcaaatatccagattatattaaaatggtgtcagaaccatatggcgacagcttatttttttatttacgaagggaacaaatgtttgttagacatttatttaatagggctggtgctgttggtgaaaatgtaccagacgatttatacattaaaggctctgggtctactgcaaatttagccagttcaaattattttcctacacctagtggttctatggttacctctgatgcccaaatattcaataaaccttattggttacaacgagcacagggccacaataatggcatttgttggggtaaccaactatttgttactgttgttgatactacacgcagtacaaatatgtcattatgtgctgccatatctacttcagaaactacatataaaaatactaactttaaggagtacctacgacatggggaggaatatgatttacagtttatttttcaactgtgcaaaataaccttaactgcagacgttatgacatacatacattctatgaattctactattttggaggactggaattttggtctacaacctcccccaggaggcacactagaagatacttataggtttgtaacatcccaggcaattgcttgtcaaaaacatacacctccagcacctaaagaagatccccttaaaaaatacactttttgggaagtaaatttaaaggaaaagttttctgcagacctagatcagtttcctttaggacgcaaatttttactacaagcaggattaaaggccaaaccaaaatttacattaggaaaacgaaaagctacacccaccacctcatctacctctacaactgctaaacgcaaaaaacgtaagctgtaagtattgtatgtgtgttgaattagtgttgtttgttgtttatatgtttgtatgtgcttgtatgtgcttgtaaatattaagttgtatgtgtgtttgtatgtatggtataataaacacgtgtgtatgtgtttttaaatgcttgtgtaactattgtgtcatgcaacataaataaacttattgtttcaacacctactaattgtgttgtggttattcattgtatataaactatatttgctacatcctgtttttgttttatatatactatattttgtagcgccagcggccattttgtagcttcaaccgaattcggttgcatgctttttggcacaaaatgtgtttttttaaatagttctatgtcagcaactatagtttaaacttgtacgtttcctgcttgccatgcgtgccaaatccctgttttcctgacctgcactgcttgccaaccattccattgttttttacactgcactatgtgcaactactgaatcactatgtacattgtgtcatataaaataaatcactatgcgccaacgccttacataccgctgttaggcacatatttttggcttgttttaactaccctaattgcatatttggcataaggtttaaacttctaaggccaactaaatgtcaccctagttcatacatgaactgtgtaaaggttagtcatacattgttcatttgtaaaactgcacatgggtgtgtgcaaaccgttttgggttacacatttacaagcaacttatataataatactaaactacaataattcatgtataaaactaagggcgtaaccgaaatcggttgaaccgaaaccggttagtataaaagcagacattttatgcaccaaaagagaactgcaatgtttcaggacccacaggagcgacccagaaagttaccacagttatgcacagagctgcaaacaactatacatgatataatattagaatgtgtgtactgcaagcaacagttactgcgacgtgaggtatatgactttgcttttcgggatttatgcatagtatatagagatgggagtccatatgctgtatgtgataaatgtttaaagttttattctaaaattagtgagtatagacattattgttatagtttgtatggaacaacattagaacagcaatacaacaaaccgttgtgtgatttgttaattaggtgtattaactgtcaaaagccactgtgtcctgaagaaaagcaaagacatctggacaaaaagcaaagattccataatataaggggtcggtggaccggtcgatgtatgtcttgttgcagatcatcaagaacacgtagagaaacccagctgtaatcatgcatggagatacacctacattgcatgaatatatgttagatttgcaaccagagacaactgatctctactgttatgagcaattaaatgacagctcagaggaggaagatgaaatagatggtccagctggacaagcagaaccggacagagcccattacaatattgtaaccttttgttgcaagtgtgactctacgcttcggttgtgcgtacaaagcacacacgtagacattcgtactttggaagacctgttaatgggcacactaggaattgtgtgccccatctgttctcagaaaccataatctacc
